(19) United States
(12) Patent Application Publication
(10) Pub. No.: US 2020/0071382 A1
(43) Pub. Date: Mar. 5, 2020

(54) TGF-BETA SUPERFAMILY HETEROMULTIMERS AND USES THEREOF

(71) Applicant: Acceleron Pharma Inc., Cambridge, MA (US)

(72) Inventors: Ravindra Kumar, Acton, MA (US); Asya Grinberg, Lexington, MA (US); Dianne Sako, Medford, MA (US); Roselyne Castonguay, Watertown, MA (US)

(73) Assignee: Acceleron Pharma Inc., Cambridge, MA (US)

(21) Appl. No.: 16/315,338

(22) PCT Filed: Jul. 6, 2017
(86) PCT No.: PCT/US2017/040849

§ 371 Date: Jan. 4, 2019

Related U.S. Application Data
(60) Provisional application No. 62/359,614, filed on Jul. 7, 2016.
(60) Provisional application No. 62/404,670, filed on Oct. 5, 2016.

(51) Int. Cl. C07K 14/71; C07K 14/705; C07K 14/47; C12N 15/85

(52) U.S. Cl. CPC C07K 14/71; C07K 14/70596; A61K 38/00; C12N 15/85; C07K 2319/30; C07K 14/47

(57) ABSTRACT

The present invention discloses heterodimers comprising endoglin-Fc and ALKI-Fc, or hetero dimers comprising endoglin-Fc and ALK2-Fc. The Fe domains can include amino acid mutations that promote heterodimer formation. In certain aspects, the disclosure provides heteromeric polypeptide complexes comprising a co-receptor of the TGF-beta superfamily and an extracellular domain of a type I serine/threonine kinase receptor of the TGF beta superfamily, an extracellular domain of a type II serine/threonine kinase receptor of the TGF-beta superfamily, or an additional co-receptor of the TGF-beta superfamily. In some embodiments, the disclosure provides heteromultimers comprising a ligand-domain of one or more co-receptor selected from: endoglin, Cripto-1, Cryptic, Cryptic family protein IB, CRIMI, CRIM2, BAMBI, BMPER, RGM-A, RGMB, hemojuvelin, betaglycan, and MuSK. In some embodiments, the disclosure provides soluble heteromultimers comprising a ligand-domain of a co-receptor and a ligand-binding domain of a type II receptor selected from: ActRIIA, ActRIIB. TGFBRII, BMPRII, and MISRII. In some embodiments, the disclosure provides soluble heteromultimers comprising a ligand-domain of a co-receptor and a ligand-binding domain of a type I receptor selected from: ALK1, ALK2, ALK3, ALK4, ALK5, ALK6, and ALK7. In certain aspects, such TGF-beta superfamily heteromultimers may be used to regulate (promote or inhibit) growth of tissues or cells including, for example, bone and hematopoietic lineages, including red blood cells.

### CROSS-REFERENCE TO RELATED APPLICATIONS

[0001] This application is a national stage filing under 35 U.S.C. § 371 of International Application No. PCT/US2017/040849, filed on Jul. 6, 2017, which claims the benefit of priority to U.S. provisional application Ser. No. 62/359,614, filed on Jul. 7, 2016 and 62/404,670, filed on Oct. 5, 2016. The disclosures of each of the foregoing applications are hereby incorporated by reference in their entirety.

### SEQUENCE LISTING

[0002] The instant application contains a Sequence Listing which has been submitted via EFS-Web and is hereby incorporated by reference in its entirety. Said ASCII copy, created on Jan. 4, 2019, is named 1848493-0002-113-301_Seq.txt and is 668,081 bytes in size.

### BACKGROUND OF THE INVENTION

[0003] The transforming growth factor-beta (TGF-beta) superfamily contains a variety of growth factors that share common sequence elements and structural motifs. These proteins are known to exert biological effects on a large variety of cell types in both vertebrates and invertebrates. Members of the superfamily perform important functions during embryonic development in pattern formation and tissue specification and can influence a variety of differentiation processes, including adipogenesis, myogenesis, chondrogenesis, cardiogenesis, hematopoiesis, neurogenesis, and epithelial cell differentiation. The family is divided into two general phylogenetic clades: the more recently evolved members of the superfamily, which includes TGF-betas, Activins, and nodal and the Glade of more distantly related proteins of the superfamily, which includes a number of BMPs and GDFs. Hinck (2012) FEBS Letters 586:1860-1870. TGF-beta family members have diverse, often complementary biological effects. By manipulating the activity of a member of the TGF-beta family, it is often possible to cause significant physiological changes in an organism. For example, the Piedmontese and Belgian Blue cattle breeds carry a loss-of-function mutation in the GDF8 (also called myostatin) gene that causes a marked increase in muscle mass. Grobet et al. (1997) Nat Genet., 17(1):71-4. Furthermore, in humans, inactive alleles of GDF8 are associated with increased muscle mass and, reportedly, exceptional strength. Schuelke et al. (2004) N Engl J Med, 350:2682-8.

[0004] Changes in bone, red blood cells, and other tissues may be achieved by enhancing or inhibiting signaling (e.g., SMAD 1, 2, 3, 5, and/or 8) that is mediated by ligands of the TGF-beta family. Thus, there is a need for agents that regulate the activity of various ligands of the TGF-beta superfamily.

### SUMMARY OF THE INVENTION

[0005] In part, the disclosure provides recombinant TGF-beta superfamily heteromultimers (heteromultimers) comprising at least one TGF-beta superfamily co-receptor polypeptide (e.g., endoglin, betaglycan, Cripto-1, Cryptic, Cryptic family protein 1B, Crim1, Crim2, BAMBI, BMPER, RGM-A, RGM-B, MuSK, and hemojuvelin), including fragments and variants thereof. In some embodiments, the disclosure relates to a recombinant heteromultimer comprising a TGF-beta superfamily co-receptor polypeptide selected from the group consisting of: endoglin, betaglycan, Cripto-1, Cryptic, Cryptic family protein 1B, Crim1, Crim2, BAMBI, BMPER, RGM-A, RGM-B, MuSK, and hemojuvelin, including fragments and variants thereof, and a TGF-beta superfamily type I receptor polypeptide selected from the group consisting of: ALK1, ALK2, ALK3, ALK4, ALK5, ALK6, and ALK7, including fragments and variants thereof. In some embodiments, the disclosure relates to a recombinant heteromultimer comprising a TGF-beta superfamily co-receptor polypeptide selected from the group consisting of: endoglin, betaglycan, Cripto-1, Cryptic, Cryptic family protein 1B, Crim1, Crim2, BAMBI, BMPER, RGM-A, RGM-B, MuSK, and hemojuvelin, including fragments and variants thereof, and a TGF-beta superfamily type II receptor polypeptide selected from the group consisting of: ActRIIA, ActRIIB, TGFBRII, BMPRII, and MISRII, including fragments and variants thereof. In some embodiments, the disclosure relates to a recombinant heteromultimer comprising a first TGF-beta superfamily co-receptor polypeptide selected from the group consisting of: endoglin, betaglycan, Cripto-1, Cryptic, Cryptic family protein 1B, Crim1, Crim2, BAMBI, BMPER, RGM-A, RGM-B, MuSK, and hemojuvelin, including fragments and variants thereof, and a second TGF-beta superfamily co-receptor polypeptide selected from the group consisting of: endoglin, betaglycan, Cripto-1, Cryptic, Cryptic family protein 1B, Crim1, Crim2, BAMBI, BMPER, RGM-A, RGM-B, MuSK, and hemojuvelin, including fragments and variants thereof. Preferably, TGF-beta superfamily co-receptor, type I receptor, and type II receptor polypeptides as described herein comprise a ligand-binding domain of the receptor, for example, an extracellular domain of a TGF-beta superfamily co-receptor, type I receptor, or type II receptor. In other preferred embodiments, polypeptides and heteromultimers of the disclosure (e.g., co-receptor:type I receptor, co-receptor:type II receptor, and co-receptor:co-receptor heteromultimers) are soluble. In certain preferred embodiments, heteromultimers of the disclosure (e.g., co-receptor:type I receptor, co-receptor:type II receptor, and co-receptor:co-receptor heteromultimers) bind to one or more TGF-beta superfamily ligands (e.g., BMP2, BMP2/7, BMP3, BMP4, BMP4/7, BMP5, BMP6, BMP7, BMP8a, BMP8b, BMP9, BMP10, GDF3, GDF5, GDF6/BMP13, GDF7, GDF8, GDF9b/BMP15, GDF11/BMP11, GDF15/MIC1, TGF-β1, TGF-β2, TGF-β3, activin A, activin B, activin C, activin E, activin AB, activin AC, activin AE, activin BC, activin BE, nodal, glial cell-derived neurotrophic factor (GDNF), neurturin, artemin, persephin, Müllerian-inhibiting substance (MIS), and Lefty). In some embodiments, a heteromultimer (e.g., co-receptor:type I receptor, co-receptor:type II receptor, and co-receptor:co-receptor heteromultimers) may bind to one or more TGF-beta superfamily ligands with a K_{D} of at least 1×10⁻⁷ M (e.g., K_{D} of greater than or equal to 10⁻⁷, 10⁻⁸, 10⁻⁹, 10⁻¹⁰, 10⁻¹¹, or 10⁻¹²). In some embodiments, a heteromultimer of the disclosure (e.g., co-receptor:type I receptor, co-receptor:type II receptor, and co-receptor:co-receptor heteromultimers) has a different TGF-beta superfamily ligand binding and/or inhibition profile (specificity) compared to a corresponding homomultimer (e.g., endoglin:ALK1 heteromultimer vs. endoglin and ALK1 homomultimers). In some embodiments, a heteromultimer of the disclosure (e.g., co-receptor:type I receptor, co-receptor:type II receptor, and co-receptor:co-receptor heteromultimers) may inhibit one or more TGF-beta superfamily ligands (e.g., BMP2, BMP2/7, BMP3, BMP4, BMP4/7, BMP5, BMP6, BMP7, BMP8a, BMP8b, BMP9, BMP10, GDF3, GDF5, GDF6/BMP13, GDF7, GDF8, GDF9b/BMP15, GDF11/BMP11, GDF15/MIC1, TGF-β1, TGF-β2, TGF-β3, activin A, activin B, activin C, activin E, activin AB, activin AC, activin AE, activin BC, activin BE, nodal, glial cell-derived neurotrophic factor (GDNF), neurturin, artemin, persephin, Müllerian-inhibiting substance (MIS), and Lefty). In some embodiments, a heteromultimer of the disclosure (e.g., co-receptor:type I receptor, co-receptor:type II receptor, and co-receptor:co-receptor heteromultimers) may inhibit signaling of one or more TGF-beta superfamily ligands. For example, in some embodiments, a heteromultimer of the disclosure (e.g., co-receptor:type I receptor, co-receptor:type II receptor, and co-receptor:co-receptor heteromultimers) may inhibit signaling of one or more TGF-beta superfamily ligands in a cell-based assay (e.g., cell-based signaling assays as described herein). In some embodiments, heteromultimers of the disclosure are heterodimers.

[0006] In certain aspects, the disclosure relates to heteromultimers that comprise at least one endoglin polypeptide, which includes fragments, functional variants, and modified forms thereof, and at least one ALK1 polypeptide, which includes fragments, functional variants, and modified forms thereof. In some embodiments, the endoglin:ALK1 heteromultimer comprises a polypeptide that is at least 70%, 75%, 80%, 85%, 90%, 91%, 92%, 93%, 94%, 95%, 95%, 96%, 97%, 98%, 99%, or 100% identical to the amino acid sequence of any one of SEQ ID NOs: 501, 502, 505, 506, 509, 510, 593, or 594. In some embodiments, the endoglin:ALK1 heteromultimer comprises a polypeptide that is at least 70%, 75%, 80%, 85%, 90%, 91%, 92%, 93%, 94%, 95%, 95%, 96%, 97%, 98%, 99%, or 100% identical to a polypeptide that begins at any one of amino acids of 26-30 of SEQ ID NO: 501 and ends at any one of amino acids 330-346 of SEQ ID NO: 501. In some embodiments, the endoglin:ALK1 heteromultimer comprises a polypeptide that is at least 70%, 75%, 80%, 85%, 90%, 91%, 92%, 93%, 94%, 95%, 95%, 96%, 97%, 98%, 99%, or 100% identical to a polypeptide that begins at any one of amino acids of 26-30 of SEQ ID NO: 505 and ends at any one of amino acids 330-346 of SEQ ID NO: 505. In some embodiments, the endoglin:ALK1 heteromultimer comprises a polypeptide that is at least 70%, 75%, 80%, 85%, 90%, 91%, 92%, 93%, 94%, 95%, 95%, 96%, 97%, 98%, 99%, or 100% identical to a polypeptide that begins at any one of amino acids of 1-25 of SEQ ID NO: 509, and ends at any one of amino acids 148-164 of SEQ ID NO: 509. In some embodiments, the endoglin:ALK1 heteromultimer comprises a polypeptide that is at least 70%, 75%, 80%, 85%, 90%, 91%, 92%, 93%, 94%, 95%, 95%, 96%, 97%, 98%, 99%, or 100% identical to the amino acid sequence of any one of SEQ ID NOs: 14 or 15. In some embodiments, the endoglin:ALK1 heteromultimer comprises a polypeptide that is at least 70%, 75%, 80%, 85%, 90%, 91%, 92%, 93%, 94%, 95%, 95%, 96%, 97%, 98%, 99%, or 100% identical to a polypeptide that begins at any one of amino acids of 22-34 of SEQ ID NO: 14 and ends at any one of amino acids 95-118 of SEQ ID NO: 14. In certain preferred embodiments, endoglin:ALK1 heteromultimers are soluble. In some embodiments, an endoglin:ALK1 heteromultimer of the disclosure binds to one or more TGF-beta superfamily ligands (e.g., binds to one or more TGF-beta superfamily ligands with a K_{D} of at least 1×10⁻⁷). In some embodiments, an endoglin:ALK1 heteromultimer of the disclosure inhibits one or more TGF-beta superfamily ligands (e.g., inhibits Smad signaling). Heteromultimer-ligand binding and inhibition may be determined using a variety of assays including, for example, those described herein (e.g., in vitro binding and/or cell-based signaling assays). In some embodiments, an endoglin:ALK1 heteromultimer of the disclosure has a different TGF-beta ligand binding and/or inhibition profile (specificity) compared to a corresponding homomultimer (e.g., endoglin and ALK1 homomultimers). In some embodiments, an endoglin:ALK1 heteromultimer of the disclosure is a heterodimer.

[0007] In certain aspects, the disclosure relates to heteromultimers that comprise at least one endoglin polypeptide, which includes fragments, functional variants, and modified forms thereof, and at least one ALK2 polypeptide, which includes fragments, functional variants, and modified forms thereof. In some embodiments, the endoglin:ALK2 heteromultimer comprises a polypeptide that is at least 70%, 75%, 80%, 85%, 90%, 91%, 92%, 93%, 94%, 95%, 95%, 96%, 97%, 98%, 99%, or 100% identical to the amino acid sequence of any one of SEQ ID NOs: 501, 502, 505, 506, 509, 510, 593, or 594. In some embodiments, the endoglin:ALK2 heteromultimer comprises a polypeptide that is at least 70%, 75%, 80%, 85%, 90%, 91%, 92%, 93%, 94%, 95%, 95%, 96%, 97%, 98%, 99%, or 100% identical to a polypeptide that begins at any one of amino acids of 26-30 of SEQ ID NO: 501 and ends at any one of amino acids 330-346 of SEQ ID NO: 501. In some embodiments, the endoglin:ALK2 heteromultimer comprises a polypeptide that is at least 70%, 75%, 80%, 85%, 90%, 91%, 92%, 93%, 94%, 95%, 95%, 96%, 97%, 98%, 99%, or 100% identical to a polypeptide that begins at any one of amino acids of 26-30 of SEQ ID NO: 505 and ends at any one of amino acids 330-346 of SEQ ID NO: 505. In some embodiments, the endoglin:ALK2 heteromultimer comprises a polypeptide that is at least 70%, 75%, 80%, 85%, 90%, 91%, 92%, 93%, 94%, 95%, 95%, 96%, 97%, 98%, 99%, or 100% identical to a polypeptide that begins at any one of amino acids of 1-25 of SEQ ID NO: 509, and ends at any one of amino acids 148-164 of SEQ ID NO: 509. In some embodiments, the endoglin:ALK2 heteromultimer comprises a polypeptide that is at least 70%, 75%, 80%, 85%, 90%, 91%, 92%, 93%, 94%, 95%, 95%, 96%, 97%, 98%, 99%, or 100% identical to the amino acid sequence of any one of SEQ ID NOs: SEQ ID NO: 18 or 19. In some embodiments the endoglin:ALK2 heteromultimer comprises a polypeptide that is at least 70%, 75%, 80%, 85%, 90%, 91%, 92%, 93%, 94%, 95%, 95%, 96%, 97%, 98%, 99%, or 100% identical to a polypeptide that begins at any one of amino acids of 21-35 of SEQ ID NO: 18 and ends at any one of amino acids 99-123 of SEQ ID NO: 18. In certain preferred embodiments, endoglin:ALK2 heteromultimers are soluble. In some embodiments, an endoglin:ALK2 heteromultimer of the disclosure binds to one or more TGF-beta superfamily ligands (e.g., binds to one or more TGF-beta superfamily ligands with a K_{D} of at least 1×10⁻⁷). In some embodiments, an endoglin:ALK2 heteromultimer of the disclosure inhibits one or more TGF-beta superfamily ligands (e.g., inhibits Smad signaling). Heteromultimer-ligand binding and inhibition may be determined using a variety of assays including, for example, those described herein (e.g., in vitro binding and/or cell-based signaling assays). In some embodiments, an endoglin:ALK2 heteromultimer of the disclosure has a different TGF-beta ligand binding and/or inhibition profile (specificity) compared to a corresponding homomultimer (e.g., endoglin and ALK2 homomultimers). In some embodiments, an endoglin:ALK2 heteromultimer of the disclosure is a heterodimer.

[0008] In certain aspects, the disclosure relates to heteromultimers that comprise at least one endoglin polypeptide, which includes fragments, functional variants, and modified forms thereof, and at least one ALK3 polypeptide, which includes fragments, functional variants, and modified forms thereof. In some embodiments, the endoglin:ALK3 heteromultimer comprises a polypeptide that is at least 70%, 75%, 80%, 85%, 90%, 91%, 92%, 93%, 94%, 95%, 95%, 96%, 97%, 98%, 99%, or 100% identical to the amino acid sequence of any one of SEQ ID NOs: 501, 502, 505, 506, 509, 510, 593, or 594. In some embodiments, the endoglin:ALK3 heteromultimer comprises a polypeptide that is at least 70%, 75%, 80%, 85%, 90%, 91%, 92%, 93%, 94%, 95%, 95%, 96%, 97%, 98%, 99%, or 100% identical to a polypeptide that begins at any one of amino acids of 26-30 of SEQ ID NO: 501 and ends at any one of amino acids 330-346 of SEQ ID NO: 501. In some embodiments, the endoglin:ALK3 heteromultimer comprises a polypeptide that is at least 70%, 75%, 80%, 85%, 90%, 91%, 92%, 93%, 94%, 95%, 95%, 96%, 97%, 98%, 99%, or 100% identical to a polypeptide that begins at any one of amino acids of 26-30 of SEQ ID NO: 505 and ends at any one of amino acids 330-346 of SEQ ID NO: 505. In some embodiments, the endoglin:ALK3 heteromultimer comprises a polypeptide that is at least 70%, 75%, 80%, 85%, 90%, 91%, 92%, 93%, 94%, 95%, 95%, 96%, 97%, 98%, 99%, or 100% identical to a polypeptide that begins at any one of amino acids of 1-25 of SEQ ID NO: 509, and ends at any one of amino acids 148-164 of SEQ ID NO: 509. In some embodiments, the endoglin:ALK3 heteromultimer comprises a polypeptide that is at least 70%, 75%, 80%, 85%, 90%, 91%, 92%, 93%, 94%, 95%, 95%, 96%, 97%, 98%, 99%, or 100% identical to the amino acid sequence of any one of SEQ ID NOs: SEQ ID NO: 22 or 23. In some embodiments the endoglin:ALK3 heteromultimer comprises a polypeptide that is at least 70%, 75%, 80%, 85%, 90%, 91%, 92%, 93%, 94%, 95%, 95%, 96%, 97%, 98%, 99%, or 100% identical to a polypeptide that begins at any one of amino acids of 24-61 of SEQ ID NO: 22 and ends at any one of amino acids 130-152 of SEQ ID NO: 22. In certain preferred embodiments, endoglin:ALK3 heteromultimers are soluble. In some embodiments, an endoglin:ALK3 heteromultimer of the disclosure binds to one or more TGF-beta superfamily ligands (e.g., binds to one or more TGF-beta superfamily ligands with a K_{D} of at least 1×10⁻⁷). In some embodiments, an endoglin:ALK3 heteromultimer of the disclosure inhibits one or more TGF-beta superfamily ligands (e.g., inhibits Smad signaling). Heteromultimer-ligand binding and inhibition may be determined using a variety of assays including, for example, those described herein (e.g., in vitro binding and/or cell-based signaling assays). In some embodiments, an endoglin:ALK3 heteromultimer of the disclosure has a different TGF-beta ligand binding and/or inhibition profile (specificity) compared to a corresponding homomultimer (e.g., endoglin and ALK3 homomultimers). In some embodiments, an endoglin:ALK3 heteromultimer of the disclosure is a heterodimer.

[0009] In certain aspects, the disclosure relates to heteromultimers that comprise at least one endoglin polypeptide, which includes fragments, functional variants, and modified forms thereof, and at least one ALK4 polypeptide, which includes fragments, functional variants, and modified forms thereof. In some embodiments, the endoglin:ALK4 heteromultimer comprises a polypeptide that is at least 70%, 75%, 80%, 85%, 90%, 91%, 92%, 93%, 94%, 95%, 95%, 96%, 97%, 98%, 99%, or 100% identical to the amino acid sequence of any one of SEQ ID NOs: 501, 502, 505, 506, 509, 510, 593, or 594. In some embodiments, the endoglin:ALK4 heteromultimer comprises a polypeptide that is at least 70%, 75%, 80%, 85%, 90%, 91%, 92%, 93%, 94%, 95%, 95%, 96%, 97%, 98%, 99%, or 100% identical to a polypeptide that begins at any one of amino acids of 26-30 of SEQ ID NO: 501 and ends at any one of amino acids 330-346 of SEQ ID NO: 501. In some embodiments, the endoglin:ALK4 heteromultimer comprises a polypeptide that is at least 70%, 75%, 80%, 85%, 90%, 91%, 92%, 93%, 94%, 95%, 95%, 96%, 97%, 98%, 99%, or 100% identical to a polypeptide that begins at any one of amino acids of 26-30 of SEQ ID NO: 505 and ends at any one of amino acids 330-346 of SEQ ID NO: 505. In some embodiments, the endoglin:ALK4 heteromultimer comprises a polypeptide that is at least 70%, 75%, 80%, 85%, 90%, 91%, 92%, 93%, 94%, 95%, 95%, 96%, 97%, 98%, 99%, or 100% identical to a polypeptide that begins at any one of amino acids of 1-25 of SEQ ID NO: 509, and ends at any one of amino acids 148-164 of SEQ ID NO: 509. In some embodiments, the endoglin:ALK4 heteromultimer comprises a polypeptide that is at least 70%, 75%, 80%, 85%, 90%, 91%, 92%, 93%, 94%, 95%, 95%, 96%, 97%, 98%, 99%, or 100% identical to the amino acid sequence of any one of SEQ ID NOs: SEQ ID NO: 26, 27, 83, or 84. In some embodiments the endoglin:ALK4 heteromultimer comprises a polypeptide that is at least 70%, 75%, 80%, 85%, 90%, 91%, 92%, 93%, 94%, 95%, 95%, 96%, 97%, 98%, 99%, or 100% identical to a polypeptide that begins at any one of amino acids of 24-34 of SEQ ID NO: 26 and ends at any one of amino acids 101-126 of SEQ ID NO: 26. In some embodiments the endoglin:ALK4 heteromultimer comprises a polypeptide that is at least 70%, 75%, 80%, 85%, 90%, 91%, 92%, 93%, 94%, 95%, 95%, 96%, 97%, 98%, 99%, or 100% identical to a polypeptide that begins at any one of amino acids of 24-34 of SEQ ID NO: 83 and ends at any one of amino acids 101-126 of SEQ ID NO: 83. In certain preferred embodiments, endoglin:ALK4 heteromultimers are soluble. In some embodiments, an endoglin:ALK4 heteromultimer of the disclosure binds to one or more TGF-beta superfamily ligands (e.g., binds to one or more TGF-beta superfamily ligands with a K_{D} of at least 1×10⁻⁷). In some embodiments, an endoglin:ALK4 heteromultimer of the disclosure inhibits one or more TGF-beta superfamily ligands (e.g., inhibits Smad signaling). Heteromultimer-ligand binding and inhibition may be determined using a variety of assays including, for example, those described herein (e.g., in vitro binding and/or cell-based signaling assays). In some embodiments, an endoglin:ALK4 heteromultimer of the disclosure has a different TGF-beta ligand binding and/or inhibition profile (specificity) compared to a corresponding homomultimer (e.g., endoglin and ALK4 homomultimers). In some embodiments, an endoglin:ALK4 heteromultimer of the disclosure is a heterodimer.

[0010] In certain aspects, the disclosure relates to heteromultimers that comprise at least one endoglin polypeptide, which includes fragments, functional variants, and modified forms thereof, and at least one ALK5 polypeptide, which includes fragments, functional variants, and modified forms thereof. In some embodiments, the endoglin:ALK5 heteromultimer comprises a polypeptide that is at least 70%, 75%, 80%, 85%, 90%, 91%, 92%, 93%, 94%, 95%, 95%, 96%, 97%, 98%, 99%, or 100% identical to the amino acid sequence of any one of SEQ ID NOs: 501, 502, 505, 506, 509, 510, 593, or 594. In some embodiments, the endoglin:ALK5 heteromultimer comprises a polypeptide that is at least 70%, 75%, 80%, 85%, 90%, 91%, 92%, 93%, 94%, 95%, 95%, 96%, 97%, 98%, 99%, or 100% identical to a polypeptide that begins at any one of amino acids of 26-30 of SEQ ID NO: 501 and ends at any one of amino acids 330-346 of SEQ ID NO: 501. In some embodiments, the endoglin:ALK5 heteromultimer comprises a polypeptide that is at least 70%, 75%, 80%, 85%, 90%, 91%, 92%, 93%, 94%, 95%, 95%, 96%, 97%, 98%, 99%, or 100% identical to a polypeptide that begins at any one of amino acids of 26-30 of SEQ ID NO: 505 and ends at any one of amino acids 330-346 of SEQ ID NO: 505. In some embodiments, the endoglin:ALK5 heteromultimer comprises a polypeptide that is at least 70%, 75%, 80%, 85%, 90%, 91%, 92%, 93%, 94%, 95%, 95%, 96%, 97%, 98%, 99%, or 100% identical to a polypeptide that begins at any one of amino acids of 1-25 of SEQ ID NO: 509, and ends at any one of amino acids 148-164 of SEQ ID NO: 509. In some embodiments, the endoglin:ALK5 heteromultimer comprises a polypeptide that is at least 70%, 75%, 80%, 85%, 90%, 91%, 92%, 93%, 94%, 95%, 95%, 96%, 97%, 98%, 99%, or 100% identical to the amino acid sequence of any one of SEQ ID NOs: SEQ ID NO: 30, 31, 87, or 88. In some embodiments the endoglin:ALK5 heteromultimer comprises a polypeptide that is at least 70%, 75%, 80%, 85%, 90%, 91%, 92%, 93%, 94%, 95%, 95%, 96%, 97%, 98%, 99%, or 100% identical to a polypeptide that begins at any one of amino acids of 25-36 of SEQ ID NO: 30 and ends at any one of amino acids 101-126 of SEQ ID NO: 30. In some embodiments the endoglin:ALK5 heteromultimer comprises a polypeptide that is at least 70%, 75%, 80%, 85%, 90%, 91%, 92%, 93%, 94%, 95%, 95%, 96%, 97%, 98%, 99%, or 100% identical to a polypeptide that begins at any one of amino acids of 25-36 of SEQ ID NO: 87 and ends at any one of amino acids 101-130 of SEQ ID NO: 87. In certain preferred embodiments, endoglin:ALK5 heteromultimers are soluble. In some embodiments, an endoglin:ALK5 heteromultimer of the disclosure binds to one or more TGF-beta superfamily ligands (e.g., binds to one or more TGF-beta superfamily ligands with a K_{D} of at least 1×10⁻⁷). In some embodiments, an endoglin:ALK5 heteromultimer of the disclosure inhibits one or more TGF-beta superfamily ligands (e.g., inhibits Smad signaling). Heteromultimer-ligand binding and inhibition may be determined using a variety of assays including, for example, those described herein (e.g., in vitro binding and/or cell-based signaling assays). In some embodiments, an endoglin:ALK5 heteromultimer of the disclosure has a different TGF-beta ligand binding and/or inhibition profile (specificity) compared to a corresponding homomultimer (e.g., endoglin and ALK5 homomultimers). In some embodiments, an endoglin:ALK5 heteromultimer of the disclosure is a heterodimer.

[0011] In certain aspects, the disclosure relates to heteromultimers that comprise at least one endoglin polypeptide, which includes fragments, functional variants, and modified forms thereof, and at least one ALK6 polypeptide, which includes fragments, functional variants, and modified forms thereof. In some embodiments, the endoglin:ALK6 heteromultimer comprises a polypeptide that is at least 70%, 75%, 80%, 85%, 90%, 91%, 92%, 93%, 94%, 95%, 95%, 96%, 97%, 98%, 99%, or 100% identical to the amino acid sequence of any one of SEQ ID NOs: 501, 502, 505, 506, 509, 510, 593, or 594. In some embodiments, the endoglin:ALK6 heteromultimer comprises a polypeptide that is at least 70%, 75%, 80%, 85%, 90%, 91%, 92%, 93%, 94%, 95%, 95%, 96%, 97%, 98%, 99%, or 100% identical to a polypeptide that begins at any one of amino acids of 26-30 of SEQ ID NO: 501 and ends at any one of amino acids 330-346 of SEQ ID NO: 501. In some embodiments, the endoglin:ALK6 heteromultimer comprises a polypeptide that is at least 70%, 75%, 80%, 85%, 90%, 91%, 92%, 93%, 94%, 95%, 95%, 96%, 97%, 98%, 99%, or 100% identical to a polypeptide that begins at any one of amino acids of 26-30 of SEQ ID NO: 505 and ends at any one of amino acids 330-346 of SEQ ID NO: 505. In some embodiments, the endoglin:ALK6 heteromultimer comprises a polypeptide that is at least 70%, 75%, 80%, 85%, 90%, 91%, 92%, 93%, 94%, 95%, 95%, 96%, 97%, 98%, 99%, or 100% identical to a polypeptide that begins at any one of amino acids of 1-25 of SEQ ID NO: 509, and ends at any one of amino acids 148-164 of SEQ ID NO: 509. In some embodiments, the endoglin:ALK6 heteromultimer comprises a polypeptide that is at least 70%, 75%, 80%, 85%, 90%, 91%, 92%, 93%, 94%, 95%, 95%, 96%, 97%, 98%, 99%, or 100% identical to the amino acid sequence of any one of SEQ ID NOs: SEQ ID NO: 34, 35, 91, or 92. In some embodiments the endoglin:ALK6 heteromultimer comprises a polypeptide that is at least 70%, 75%, 80%, 85%, 90%, 91%, 92%, 93%, 94%, 95%, 95%, 96%, 97%, 98%, 99%, or 100% identical to a polypeptide that begins at any one of amino acids of 14-32 of SEQ ID NO: 34 and ends at any one of amino acids 102-126 of SEQ ID NO: 34. In some embodiments the endoglin:ALK6 heteromultimer comprises a polypeptide that is at least 70%, 75%, 80%, 85%, 90%, 91%, 92%, 93%, 94%, 95%, 95%, 96%, 97%, 98%, 99%, or 100% identical to a polypeptide that begins at any one of amino acids of 26-62 of SEQ ID NO: 91 and ends at any one of amino acids 132-156 of SEQ ID NO: 91. In certain preferred embodiments, endoglin:ALK6 heteromultimers are soluble. In some embodiments, an endoglin:ALK6 heteromultimer of the disclosure binds to one or more TGF-beta superfamily ligands (e.g., binds to one or more TGF-beta superfamily ligands with a K_{D} of at least 1×10⁻⁷). In some embodiments, an endoglin:ALK6 heteromultimer of the disclosure inhibits one or more TGF-beta superfamily ligands (e.g., inhibits Smad signaling). Heteromultimer-ligand binding and inhibition may be determined using a variety of assays including, for example, those described herein (e.g., in vitro binding and/or cell-based signaling assays). In some embodiments, an endoglin:ALK6 heteromultimer of the disclosure has a different TGF-beta ligand binding and/or inhibition profile (specificity) compared to a corresponding homomultimer (e.g., endoglin and ALK6 homomultimers). In some embodiments, an endoglin:ALK6 heteromultimer of the disclosure is a heterodimer.

[0012] In certain aspects, the disclosure relates to heteromultimers that comprise at least one endoglin polypeptide, which includes fragments, functional variants, and modified forms thereof, and at least one ALK7 polypeptide, which includes fragments, functional variants, and modified forms thereof. In some embodiments, the endoglin:ALK7 heteromultimer comprises a polypeptide that is at least 70%, 75%, 80%, 85%, 90%, 91%, 92%, 93%, 94%, 95%, 95%, 96%, 97%, 98%, 99%, or 100% identical to the amino acid sequence of any one of SEQ ID NOs: 501, 502, 505, 506, 509, 510, 593, or 594. In some embodiments, the endoglin:ALK7 heteromultimer comprises a polypeptide that is at least 70%, 75%, 80%, 85%, 90%, 91%, 92%, 93%, 94%, 95%, 95%, 96%, 97%, 98%, 99%, or 100% identical to a polypeptide that begins at any one of amino acids of 26-30 of SEQ ID NO: 501 and ends at any one of amino acids 330-346 of SEQ ID NO: 501. In some embodiments, the endoglin:ALK7 heteromultimer comprises a polypeptide that is at least 70%, 75%, 80%, 85%, 90%, 91%, 92%, 93%, 94%, 95%, 95%, 96%, 97%, 98%, 99%, or 100% identical to a polypeptide that begins at any one of amino acids of 26-30 of SEQ ID NO: 505 and ends at any one of amino acids 330-346 of SEQ ID NO: 505. In some embodiments, the endoglin:ALK7 heteromultimer comprises a polypeptide that is at least 70%, 75%, 80%, 85%, 90%, 91%, 92%, 93%, 94%, 95%, 95%, 96%, 97%, 98%, 99%, or 100% identical to a polypeptide that begins at any one of amino acids of 1-25 of SEQ ID NO: 509, and ends at any one of amino acids 148-164 of SEQ ID NO: 509. In some embodiments, the endoglin:ALK7 heteromultimer comprises a polypeptide that is at least 70%, 75%, 80%, 85%, 90%, 91%, 92%, 93%, 94%, 95%, 95%, 96%, 97%, 98%, 99%, or 100% identical to the amino acid sequence of any one of SEQ ID NOs: SEQ ID NO: 38, 39, 301, 302, 305, 306, 309, 310, or 313. In some embodiments the endoglin:ALK7 heteromultimer comprises a polypeptide that is at least 70%, 75%, 80%, 85%, 90%, 91%, 92%, 93%, 94%, 95%, 95%, 96%, 97%, 98%, 99%, or 100% identical to a polypeptide that begins at any one of amino acids of 21-28 of SEQ ID NO: 38 and ends at any one of amino acids 92-113 of SEQ ID NO: 38. In some embodiments the endoglin:ALK7 heteromultimer comprises a polypeptide that is at least 70%, 75%, 80%, 85%, 90%, 91%, 92%, 93%, 94%, 95%, 95%, 96%, 97%, 98%, 99%, or 100% identical to a polypeptide that begins at any one of amino acids of 1-13 of SEQ ID NO: 301 and ends at any one of amino acids 42-63 of SEQ ID NO: 301. In some embodiments the endoglin:ALK7 heteromultimer comprises a polypeptide that is at least 70%, 75%, 80%, 85%, 90%, 91%, 92%, 93%, 94%, 95%, 95%, 96%, 97%, 98%, 99%, or 100% identical to a polypeptide that begins at any one of amino acids of 21-28 of SEQ ID NO: 305 and ends at any one of amino acids 411-413 of SEQ ID NO: 305. In some embodiments the endoglin:ALK7 heteromultimer comprises a polypeptide that is at least 70%, 75%, 80%, 85%, 90%, 91%, 92%, 93%, 94%, 95%, 95%, 96%, 97%, 98%, 99%, or 100% identical to a polypeptide that begins at any one of amino acids of 21-28 of SEQ ID NO: 309 and ends at any one of amino acids 334-336 of SEQ ID NO: 309. In certain preferred embodiments, endoglin:ALK7 heteromultimers are soluble. In some embodiments, an endoglin:ALK7 heteromultimer of the disclosure binds to one or more TGF-beta superfamily ligands (e.g., binds to one or more TGF-beta superfamily ligands with a K_{D} of at least 1×10⁻⁷). In some embodiments, an endoglin:ALK7 heteromultimer of the disclosure inhibits one or more TGF-beta superfamily ligands (e.g., inhibits Smad signaling). Heteromultimer-ligand binding and inhibition may be determined using a variety of assays including, for example, those described herein (e.g., in vitro binding and/or cell-based signaling assays). In some embodiments, an endoglin:ALK7 heteromultimer of the disclosure has a different TGF-beta ligand binding and/or inhibition profile (specificity) compared to a corresponding homomultimer (e.g., endoglin and ALK7 homomultimers). In some embodiments, an endoglin:ALK7 heteromultimer of the disclosure is a heterodimer.

[0013] In certain aspects, the disclosure relates to heteromultimers that comprise at least one betaglycan polypeptide, which includes fragments, functional variants, and modified forms thereof, and at least one ALK1 polypeptide, which includes fragments, functional variants, and modified forms thereof. In some embodiments, the betaglycan:ALK1 heteromultimer comprises a polypeptide that is at least 70%, 75%, 80%, 85%, 90%, 91%, 92%, 93%, 94%, 95%, 95%, 96%, 97%, 98%, 99%, or 100% identical to the amino acid sequence of any one of SEQ ID NOs: 585, 586, 589, or 590. In some embodiments, the betaglycan:ALK1 heteromultimer comprises a polypeptide that is at least 70%, 75%, 80%, 85%, 90%, 91%, 92%, 93%, 94%, 95%, 95%, 96%, 97%, 98%, 99%, or 100% identical to a polypeptide that begins at any one of amino acids of 21-28 of SEQ ID NO: 585 and ends at any one of amino acids 381-787 of SEQ ID NO: 585. In some embodiments, the betaglycan:ALK1 heteromultimer comprises a polypeptide that is at least 70%, 75%, 80%, 85%, 90%, 91%, 92%, 93%, 94%, 95%, 95%, 96%, 97%, 98%, 99%, or 100% identical to a polypeptide that begins at any one of amino acids of 21-28 of SEQ ID NO: 589 and ends at any one of amino acids 380-786 of SEQ ID NO: 589. In some embodiments, the betaglycan:ALK1 heteromultimer comprises a polypeptide that is at least 70%, 75%, 80%, 85%, 90%, 91%, 92%, 93%, 94%, 95%, 95%, 96%, 97%, 98%, 99%, or 100% identical to the amino acid sequence of any one of SEQ ID NOs: 14 or 15. In some embodiments, the betaglycan:ALK1 heteromultimer comprises a polypeptide that is at least 70%, 75%, 80%, 85%, 90%, 91%, 92%, 93%, 94%, 95%, 95%, 96%, 97%, 98%, 99%, or 100% identical to a polypeptide that begins at any one of amino acids of 22-34 of SEQ ID NO: 14 and ends at any one of amino acids 95-118 of SEQ ID NO: 14. In certain preferred embodiments, betaglycan:ALK1 heteromultimers are soluble. In some embodiments, an betaglycan:ALK1 heteromultimer of the disclosure binds to one or more TGF-beta superfamily ligands (e.g., binds to one or more TGF-beta superfamily ligands with a K_{D} of at least 1×10⁻⁷). In some embodiments, an betaglycan:ALK1 heteromultimer of the disclosure inhibits one or more TGF-beta superfamily ligands (e.g., inhibits Smad signaling). Heteromultimer-ligand binding and inhibition may be determined using a variety of assays including, for example, those described herein (e.g., in vitro binding and/or cell-based signaling assays). In some embodiments, an betaglycan:ALK1 heteromultimer of the disclosure has a different TGF-beta ligand binding and/or inhibition profile (specificity) compared to a corresponding homomultimer (e.g., betaglycan and ALK1 homomultimers). In some embodiments, an betaglycan:ALK1 heteromultimer of the disclosure is a heterodimer.

[0014] In certain aspects, the disclosure relates to heteromultimers that comprise at least one betaglycan polypeptide, which includes fragments, functional variants, and modified forms thereof, and at least one ALK2 polypeptide, which includes fragments, functional variants, and modified forms thereof. In some embodiments, the betaglycan:ALK2 heteromultimer comprises a polypeptide that is at least 70%, 75%, 80%, 85%, 90%, 91%, 92%, 93%, 94%, 95%, 95%, 96%, 97%, 98%, 99%, or 100% identical to the amino acid sequence of any one of SEQ ID NOs: 585, 586, 589, or 590. In some embodiments, the betaglycan:ALK2 heteromultimer comprises a polypeptide that is at least 70%, 75%, 80%, 85%, 90%, 91%, 92%, 93%, 94%, 95%, 95%, 96%, 97%, 98%, 99%, or 100% identical to a polypeptide that begins at any one of amino acids of 21-28 of SEQ ID NO: 585 and ends at any one of amino acids 381-787 of SEQ ID NO: 585. In some embodiments, the betaglycan:ALK2 heteromultimer comprises a polypeptide that is at least 70%, 75%, 80%, 85%, 90%, 91%, 92%, 93%, 94%, 95%, 95%, 96%, 97%, 98%, 99%, or 100% identical to a polypeptide that begins at any one of amino acids of 21-28 of SEQ ID NO: 589 and ends at any one of amino acids 380-786 of SEQ ID NO: 589. In some embodiments, the betaglycan:ALK2 heteromultimer comprises a polypeptide that is at least 70%, 75%, 80%, 85%, 90%, 91%, 92%, 93%, 94%, 95%, 95%, 96%, 97%, 98%, 99%, or 100% identical to the amino acid sequence of any one of SEQ ID NOs: SEQ ID NO: 18 or 19. In some embodiments the betaglycan:ALK2 heteromultimer comprises a polypeptide that is at least 70%, 75%, 80%, 85%, 90%, 91%, 92%, 93%, 94%, 95%, 95%, 96%, 97%, 98%, 99%, or 100% identical to a polypeptide that begins at any one of amino acids of 21-35 of SEQ ID NO: 18 and ends at any one of amino acids 99-123 of SEQ ID NO: 18. In certain preferred embodiments, betaglycan:ALK2 heteromultimers are soluble. In some embodiments, an betaglycan:ALK2 heteromultimer of the disclosure binds to one or more TGF-beta superfamily ligands (e.g., binds to one or more TGF-beta superfamily ligands with a K_{D} of at least 1×10⁻⁷). In some embodiments, an betaglycan:ALK2 heteromultimer of the disclosure inhibits one or more TGF-beta superfamily ligands (e.g., inhibits Smad signaling). Heteromultimer-ligand binding and inhibition may be determined using a variety of assays including, for example, those described herein (e.g., in vitro binding and/or cell-based signaling assays). In some embodiments, an betaglycan:ALK2 heteromultimer of the disclosure has a different TGF-beta ligand binding and/or inhibition profile (specificity) compared to a corresponding homomultimer (e.g., betaglycan and ALK2 homomultimers). In some embodiments, an betaglycan:ALK2 heteromultimer of the disclosure is a heterodimer.

[0015] In certain aspects, the disclosure relates to heteromultimers that comprise at least one betaglycan polypeptide, which includes fragments, functional variants, and modified forms thereof, and at least one ALK3 polypeptide, which includes fragments, functional variants, and modified forms thereof. In some embodiments, the betaglycan:ALK3 heteromultimer comprises a polypeptide that is at least 70%, 75%, 80%, 85%, 90%, 91%, 92%, 93%, 94%, 95%, 95%, 96%, 97%, 98%, 99%, or 100% identical to the amino acid sequence of any one of SEQ ID NOs: 585, 586, 589, or 590. In some embodiments, the betaglycan:ALK3 heteromultimer comprises a polypeptide that is at least 70%, 75%, 80%, 85%, 90%, 91%, 92%, 93%, 94%, 95%, 95%, 96%, 97%, 98%, 99%, or 100% identical to a polypeptide that begins at any one of amino acids of 21-28 of SEQ ID NO: 585 and ends at any one of amino acids 381-787 of SEQ ID NO: 585. In some embodiments, the betaglycan:ALK3 heteromultimer comprises a polypeptide that is at least 70%, 75%, 80%, 85%, 90%, 91%, 92%, 93%, 94%, 95%, 95%, 96%, 97%, 98%, 99%, or 100% identical to a polypeptide that begins at any one of amino acids of 21-28 of SEQ ID NO: 589 and ends at any one of amino acids 380-786 of SEQ ID NO: 589. In some embodiments, the betaglycan:ALK3 heteromultimer comprises a polypeptide that is at least 70%, 75%, 80%, 85%, 90%, 91%, 92%, 93%, 94%, 95%, 95%, 96%, 97%, 98%, 99%, or 100% identical to the amino acid sequence of any one of SEQ ID NOs: SEQ ID NO: 22 or 23. In some embodiments the betaglycan:ALK3 heteromultimer comprises a polypeptide that is at least 70%, 75%, 80%, 85%, 90%, 91%, 92%, 93%, 94%, 95%, 95%, 96%, 97%, 98%, 99%, or 100% identical to a polypeptide that begins at any one of amino acids of 24-61 of SEQ ID NO: 22 and ends at any one of amino acids 130-152 of SEQ ID NO: 22. In certain preferred embodiments, betaglycan:ALK3 heteromultimers are soluble. In some embodiments, an betaglycan:ALK3 heteromultimer of the disclosure binds to one or more TGF-beta superfamily ligands (e.g., binds to one or more TGF-beta superfamily ligands with a K_{D} of at least 1×10⁻⁷). In some embodiments, an betaglycan:ALK3 heteromultimer of the disclosure inhibits one or more TGF-beta superfamily ligands (e.g., inhibits Smad signaling). Heteromultimer-ligand binding and inhibition may be determined using a variety of assays including, for example, those described herein (e.g., in vitro binding and/or cell-based signaling assays). In some embodiments, an betaglycan:ALK3 heteromultimer of the disclosure has a different TGF-beta ligand binding and/or inhibition profile (specificity) compared to a corresponding homomultimer (e.g., betaglycan and ALK3 homomultimers). In some embodiments, an betaglycan:ALK3 heteromultimer of the disclosure is a heterodimer.

[0016] In certain aspects, the disclosure relates to heteromultimers that comprise at least one betaglycan polypeptide, which includes fragments, functional variants, and modified forms thereof, and at least one ALK4 polypeptide, which includes fragments, functional variants, and modified forms thereof. In some embodiments, the betaglycan:ALK4 heteromultimer comprises a polypeptide that is at least 70%, 75%, 80%, 85%, 90%, 91%, 92%, 93%, 94%, 95%, 95%, 96%, 97%, 98%, 99%, or 100% identical to the amino acid sequence of any one of SEQ ID NOs: 585, 586, 589, or 590. In some embodiments, the betaglycan:ALK4 heteromultimer comprises a polypeptide that is at least 70%, 75%, 80%, 85%, 90%, 91%, 92%, 93%, 94%, 95%, 95%, 96%, 97%, 98%, 99%, or 100% identical to a polypeptide that begins at any one of amino acids of 21-28 of SEQ ID NO: 585 and ends at any one of amino acids 381-787 of SEQ ID NO: 585. In some embodiments, the betaglycan:ALK4 heteromultimer comprises a polypeptide that is at least 70%, 75%, 80%, 85%, 90%, 91%, 92%, 93%, 94%, 95%, 95%, 96%, 97%, 98%, 99%, or 100% identical to a polypeptide that begins at any one of amino acids of 21-28 of SEQ ID NO: 589 and ends at any one of amino acids 380-786 of SEQ ID NO: 589. In some embodiments, the betaglycan:ALK4 heteromultimer comprises a polypeptide that is at least 70%, 75%, 80%, 85%, 90%, 91%, 92%, 93%, 94%, 95%, 95%, 96%, 97%, 98%, 99%, or 100% identical to the amino acid sequence of any one of SEQ ID NOs: SEQ ID NO: 26, 27, 83, or 84. In some embodiments the betaglycan:ALK4 heteromultimer comprises a polypeptide that is at least 70%, 75%, 80%, 85%, 90%, 91%, 92%, 93%, 94%, 95%, 95%, 96%, 97%, 98%, 99%, or 100% identical to a polypeptide that begins at any one of amino acids of 24-34 of SEQ ID NO: 26 and ends at any one of amino acids 101-126 of SEQ ID NO: 26. In some embodiments the betaglycan:ALK4 heteromultimer comprises a polypeptide that is at least 70%, 75%, 80%, 85%, 90%, 91%, 92%, 93%, 94%, 95%, 95%, 96%, 97%, 98%, 99%, or 100% identical to a polypeptide that begins at any one of amino acids of 24-34 of SEQ ID NO: 83 and ends at any one of amino acids 101-126 of SEQ ID NO: 83. In certain preferred embodiments, betaglycan:ALK4 heteromultimers are soluble. In some embodiments, an betaglycan:ALK4 heteromultimer of the disclosure binds to one or more TGF-beta superfamily ligands (e.g., binds to one or more TGF-beta superfamily ligands with a K_{D} of at least 1×10⁻⁷). In some embodiments, an betaglycan:ALK4 heteromultimer of the disclosure inhibits one or more TGF-beta superfamily ligands (e.g., inhibits Smad signaling). Heteromultimer-ligand binding and inhibition may be determined using a variety of assays including, for example, those described herein (e.g., in vitro binding and/or cell-based signaling assays). In some embodiments, an betaglycan:ALK4 heteromultimer of the disclosure has a different TGF-beta ligand binding and/or inhibition profile (specificity) compared to a corresponding homomultimer (e.g., betaglycan and ALK4 homomultimers). In some embodiments, an betaglycan:ALK4 heteromultimer of the disclosure is a heterodimer.

[0017] In certain aspects, the disclosure relates to heteromultimers that comprise at least one betaglycan polypeptide, which includes fragments, functional variants, and modified forms thereof, and at least one ALK5 polypeptide, which includes fragments, functional variants, and modified forms thereof. In some embodiments, the betaglycan:ALK5 heteromultimer comprises a polypeptide that is at least 70%, 75%, 80%, 85%, 90%, 91%, 92%, 93%, 94%, 95%, 95%, 96%, 97%, 98%, 99%, or 100% identical to the amino acid sequence of any one of SEQ ID NOs: 585, 586, 589, or 590. In some embodiments, the betaglycan:ALK5 heteromultimer comprises a polypeptide that is at least 70%, 75%, 80%, 85%, 90%, 91%, 92%, 93%, 94%, 95%, 95%, 96%, 97%, 98%, 99%, or 100% identical to a polypeptide that begins at any one of amino acids of 21-28 of SEQ ID NO: 585 and ends at any one of amino acids 381-787 of SEQ ID NO: 585. In some embodiments, the betaglycan:ALK5 heteromultimer comprises a polypeptide that is at least 70%, 75%, 80%, 85%, 90%, 91%, 92%, 93%, 94%, 95%, 95%, 96%, 97%, 98%, 99%, or 100% identical to a polypeptide that begins at any one of amino acids of 21-28 of SEQ ID NO: 589 and ends at any one of amino acids 380-786 of SEQ ID NO: 589. In some embodiments, the betaglycan:ALK5 heteromultimer comprises a polypeptide that is at least 70%, 75%, 80%, 85%, 90%, 91%, 92%, 93%, 94%, 95%, 95%, 96%, 97%, 98%, 99%, or 100% identical to the amino acid sequence of any one of SEQ ID NOs: SEQ ID NO: 30, 31, 87, or 88. In some embodiments the betaglycan:ALK5 heteromultimer comprises a polypeptide that is at least 70%, 75%, 80%, 85%, 90%, 91%, 92%, 93%, 94%, 95%, 95%, 96%, 97%, 98%, 99%, or 100% identical to a polypeptide that begins at any one of amino acids of 25-36 of SEQ ID NO: 30 and ends at any one of amino acids 101-126 of SEQ ID NO: 30. In some embodiments the betaglycan:ALK5 heteromultimer comprises a polypeptide that is at least 70%, 75%, 80%, 85%, 90%, 91%, 92%, 93%, 94%, 95%, 95%, 96%, 97%, 98%, 99%, or 100% identical to a polypeptide that begins at any one of amino acids of 25-36 of SEQ ID NO: 87 and ends at any one of amino acids 101-130 of SEQ ID NO: 87. In certain preferred embodiments, betaglycan:ALK5 heteromultimers are soluble. In some embodiments, an betaglycan:ALK5 heteromultimer of the disclosure binds to one or more TGF-beta superfamily ligands (e.g., binds to one or more TGF-beta superfamily ligands with a K_{D} of at least 1×10⁻⁷). In some embodiments, an betaglycan:ALK5 heteromultimer of the disclosure inhibits one or more TGF-beta superfamily ligands (e.g., inhibits Smad signaling). Heteromultimer-ligand binding and inhibition may be determined using a variety of assays including, for example, those described herein (e.g., in vitro binding and/or cell-based signaling assays). In some embodiments, an betaglycan:ALK5 heteromultimer of the disclosure has a different TGF-beta ligand binding and/or inhibition profile (specificity) compared to a corresponding homomultimer (e.g., betaglycan and ALK5 homomultimers). In some embodiments, an betaglycan:ALK5 heteromultimer of the disclosure is a heterodimer.

[0018] In certain aspects, the disclosure relates to heteromultimers that comprise at least one betaglycan polypeptide, which includes fragments, functional variants, and modified forms thereof, and at least one ALK6 polypeptide, which includes fragments, functional variants, and modified forms thereof. In some embodiments, the betaglycan:ALK6 heteromultimer comprises a polypeptide that is at least 70%, 75%, 80%, 85%, 90%, 91%, 92%, 93%, 94%, 95%, 95%, 96%, 97%, 98%, 99%, or 100% identical to the amino acid sequence of any one of SEQ ID NOs: 585, 586, 589, or 590. In some embodiments, the betaglycan:ALK6 heteromultimer comprises a polypeptide that is at least 70%, 75%, 80%, 85%, 90%, 91%, 92%, 93%, 94%, 95%, 95%, 96%, 97%, 98%, 99%, or 100% identical to a polypeptide that begins at any one of amino acids of 21-28 of SEQ ID NO: 585 and ends at any one of amino acids 381-787 of SEQ ID NO: 585. In some embodiments, the betaglycan:ALK6 heteromultimer comprises a polypeptide that is at least 70%, 75%, 80%, 85%, 90%, 91%, 92%, 93%, 94%, 95%, 95%, 96%, 97%, 98%, 99%, or 100% identical to a polypeptide that begins at any one of amino acids of 21-28 of SEQ ID NO: 589 and ends at any one of amino acids 380-786 of SEQ ID NO: 589. In some embodiments, the betaglycan:ALK6 heteromultimer comprises a polypeptide that is at least 70%, 75%, 80%, 85%, 90%, 91%, 92%, 93%, 94%, 95%, 95%, 96%, 97%, 98%, 99%, or 100% identical to the amino acid sequence of any one of SEQ ID NOs: SEQ ID NO: 34, 35, 91, or 92. In some embodiments the betaglycan:ALK6 heteromultimer comprises a polypeptide that is at least 70%, 75%, 80%, 85%, 90%, 91%, 92%, 93%, 94%, 95%, 95%, 96%, 97%, 98%, 99%, or 100% identical to a polypeptide that begins at any one of amino acids of 14-32 of SEQ ID NO: 34 and ends at any one of amino acids 102-126 of SEQ ID NO: 34. In some embodiments the betaglycan:ALK6 heteromultimer comprises a polypeptide that is at least 70%, 75%, 80%, 85%, 90%, 91%, 92%, 93%, 94%, 95%, 95%, 96%, 97%, 98%, 99%, or 100% identical to a polypeptide that begins at any one of amino acids of 26-62 of SEQ ID NO: 91 and ends at any one of amino acids 132-156 of SEQ ID NO: 91. In certain preferred embodiments, betaglycan:ALK6 heteromultimers are soluble. In some embodiments, an betaglycan:ALK6 heteromultimer of the disclosure binds to one or more TGF-beta superfamily ligands (e.g., binds to one or more TGF-beta superfamily ligands with a K_{D} of at least 1×10⁻⁷). In some embodiments, an betaglycan:ALK6 heteromultimer of the disclosure inhibits one or more TGF-beta superfamily ligands (e.g., inhibits Smad signaling). Heteromultimer-ligand binding and inhibition may be determined using a variety of assays including, for example, those described herein (e.g., in vitro binding and/or cell-based signaling assays). In some embodiments, an betaglycan:ALK6 heteromultimer of the disclosure has a different TGF-beta ligand binding and/or inhibition profile (specificity) compared to a corresponding homomultimer (e.g., betaglycan and ALK6 homomultimers). In some embodiments, an betaglycan:ALK6 heteromultimer of the disclosure is a heterodimer.

[0019] In certain aspects, the disclosure relates to heteromultimers that comprise at least one betaglycan polypeptide, which includes fragments, functional variants, and modified forms thereof, and at least one ALK7 polypeptide, which includes fragments, functional variants, and modified forms thereof. In some embodiments, the betaglycan:ALK7 heteromultimer comprises a polypeptide that is at least 70%, 75%, 80%, 85%, 90%, 91%, 92%, 93%, 94%, 95%, 95%, 96%, 97%, 98%, 99%, or 100% identical to the amino acid sequence of any one of SEQ ID NOs: 585, 586, 589, or 590. In some embodiments, the betaglycan:ALK7 heteromultimer comprises a polypeptide that is at least 70%, 75%, 80%, 85%, 90%, 91%, 92%, 93%, 94%, 95%, 95%, 96%, 97%, 98%, 99%, or 100% identical to a polypeptide that begins at any one of amino acids of 21-28 of SEQ ID NO: 585 and ends at any one of amino acids 381-787 of SEQ ID NO: 585. In some embodiments, the betaglycan:ALK7 heteromultimer comprises a polypeptide that is at least 70%, 75%, 80%, 85%, 90%, 91%, 92%, 93%, 94%, 95%, 95%, 96%, 97%, 98%, 99%, or 100% identical to a polypeptide that begins at any one of amino acids of 21-28 of SEQ ID NO: 589 and ends at any one of amino acids 380-786 of SEQ ID NO: 589. In some embodiments, the betaglycan:ALK7 heteromultimer comprises a polypeptide that is at least 70%, 75%, 80%, 85%, 90%, 91%, 92%, 93%, 94%, 95%, 95%, 96%, 97%, 98%, 99%, or 100% identical to the amino acid sequence of any one of SEQ ID NOs: SEQ ID NO: 38, 39, 301, 302, 305, 306, 309, 310, or 313. In some embodiments the betaglycan:ALK7 heteromultimer comprises a polypeptide that is at least 70%, 75%, 80%, 85%, 90%, 91%, 92%, 93%, 94%, 95%, 95%, 96%, 97%, 98%, 99%, or 100% identical to a polypeptide that begins at any one of amino acids of 21-28 of SEQ ID NO: 38 and ends at any one of amino acids 92-113 of SEQ ID NO: 38. In some embodiments the betaglycan:ALK7 heteromultimer comprises a polypeptide that is at least 70%, 75%, 80%, 85%, 90%, 91%, 92%, 93%, 94%, 95%, 95%, 96%, 97%, 98%, 99%, or 100% identical to a polypeptide that begins at any one of amino acids of 1-13 of SEQ ID NO: 301 and ends at any one of amino acids 42-63 of SEQ ID NO: 301. In some embodiments the betaglycan:ALK7 heteromultimer comprises a polypeptide that is at least 70%, 75%, 80%, 85%, 90%, 91%, 92%, 93%, 94%, 95%, 95%, 96%, 97%, 98%, 99%, or 100% identical to a polypeptide that begins at any one of amino acids of 21-28 of SEQ ID NO: 305 and ends at any one of amino acids 411-413 of SEQ ID NO: 305. In some embodiments the betaglycan:ALK7 heteromultimer comprises a polypeptide that is at least 70%, 75%, 80%, 85%, 90%, 91%, 92%, 93%, 94%, 95%, 95%, 96%, 97%, 98%, 99%, or 100% identical to a polypeptide that begins at any one of amino acids of 21-28 of SEQ ID NO: 309 and ends at any one of amino acids 334-336 of SEQ ID NO: 309. In certain preferred embodiments, betaglycan:ALK7 heteromultimers are soluble. In some embodiments, an betaglycan:ALK7 heteromultimer of the disclosure binds to one or more TGF-beta superfamily ligands (e.g., binds to one or more TGF-beta superfamily ligands with a K_{D} of at least 1×10⁻⁷). In some embodiments, an betaglycan:ALK7 heteromultimer of the disclosure inhibits one or more TGF-beta superfamily ligands (e.g., inhibits Smad signaling). Heteromultimer-ligand binding and inhibition may be determined using a variety of assays including, for example, those described herein (e.g., in vitro binding and/or cell-based signaling assays). In some embodiments, an betaglycan:ALK7 heteromultimer of the disclosure has a different TGF-beta ligand binding and/or inhibition profile (specificity) compared to a corresponding homomultimer (e.g., betaglycan and ALK7 homomultimers). In some embodiments, an betaglycan:ALK7 heteromultimer of the disclosure is a heterodimer.

[0020] In certain aspects, the disclosure relates to heteromultimers that comprise at least one Cripto-1 polypeptide, which includes fragments, functional variants, and modified forms thereof, and at least one ALK1 polypeptide, which includes fragments, functional variants, and modified forms thereof. In some embodiments, the Cripto-1:ALK1 heteromultimer comprises a polypeptide that is at least 70%, 75%, 80%, 85%, 90%, 91%, 92%, 93%, 94%, 95%, 95%, 96%, 97%, 98%, 99%, or 100% identical to the amino acid sequence of any one of SEQ ID NOs: 513, 514, 517, or 518. In some embodiments, the Cripto-1:ALK1 heteromultimer comprises a polypeptide that is at least 70%, 75%, 80%, 85%, 90%, 91%, 92%, 93%, 94%, 95%, 95%, 96%, 97%, 98%, 99%, or 100% identical to a polypeptide that begins at any one of amino acids of 31-82 of SEQ ID NO: 513 and ends at any one of amino acids 172-188 of SEQ ID NO: 513. In some embodiments, the Cripto-1:ALK1 heteromultimer comprises a polypeptide that is at least 70%, 75%, 80%, 85%, 90%, 91%, 92%, 93%, 94%, 95%, 95%, 96%, 97%, 98%, 99%, or 100% identical to a polypeptide that begins at any one of amino acids of 15-66 of SEQ ID NO: 517, and ends at any one of amino acids 156-172 of SEQ ID NO: 517. In some embodiments, the Cripto-1:ALK1 heteromultimer comprises a polypeptide that is at least 70%, 75%, 80%, 85%, 90%, 91%, 92%, 93%, 94%, 95%, 95%, 96%, 97%, 98%, 99%, or 100% identical to the amino acid sequence of any one of SEQ ID NOs: 14 or 15. In some embodiments, the Cripto-1:ALK1 heteromultimer comprises a polypeptide that is at least 70%, 75%, 80%, 85%, 90%, 91%, 92%, 93%, 94%, 95%, 95%, 96%, 97%, 98%, 99%, or 100% identical to a polypeptide that begins at any one of amino acids of 22-34 of SEQ ID NO: 14 and ends at any one of amino acids 95-118 of SEQ ID NO: 14. In certain preferred embodiments, Cripto-1:ALK1 heteromultimers are soluble. In some embodiments, an Cripto-1:ALK1 heteromultimer of the disclosure binds to one or more TGF-beta superfamily ligands (e.g., binds to one or more TGF-beta superfamily ligands with a K_{D} of at least 1×10⁻⁷). In some embodiments, an Cripto-1:ALK1 heteromultimer of the disclosure inhibits one or more TGF-beta superfamily ligands (e.g., inhibits Smad signaling). Heteromultimer-ligand binding and inhibition may be determined using a variety of assays including, for example, those described herein (e.g., in vitro binding and/or cell-based signaling assays). In some embodiments, an Cripto-1:ALK1 heteromultimer of the disclosure has a different TGF-beta ligand binding and/or inhibition profile (specificity) compared to a corresponding homomultimer (e.g., Cripto-1 and ALK1 homomultimers). In some embodiments, an Cripto-1:ALK1 heteromultimer of the disclosure is a heterodimer.

[0021] In certain aspects, the disclosure relates to heteromultimers that comprise at least one Cripto-1 polypeptide, which includes fragments, functional variants, and modified forms thereof, and at least one ALK2 polypeptide, which includes fragments, functional variants, and modified forms thereof. In some embodiments, the Cripto-1:ALK2 heteromultimer comprises a polypeptide that is at least 70%, 75%, 80%, 85%, 90%, 91%, 92%, 93%, 94%, 95%, 95%, 96%, 97%, 98%, 99%, or 100% identical to the amino acid sequence of any one of SEQ ID NOs: 513, 514, 517, or 518. In some embodiments, the Cripto-1:ALK2 heteromultimer comprises a polypeptide that is at least 70%, 75%, 80%, 85%, 90%, 91%, 92%, 93%, 94%, 95%, 95%, 96%, 97%, 98%, 99%, or 100% identical to a polypeptide that begins at any one of amino acids of 31-82 of SEQ ID NO: 513 and ends at any one of amino acids 172-188 of SEQ ID NO: 513. In some embodiments, the Cripto-1:ALK2 heteromultimer comprises a polypeptide that is at least 70%, 75%, 80%, 85%, 90%, 91%, 92%, 93%, 94%, 95%, 95%, 96%, 97%, 98%, 99%, or 100% identical to a polypeptide that begins at any one of amino acids of 15-66 of SEQ ID NO: 517, and ends at any one of amino acids 156-172 of SEQ ID NO: 517. In some embodiments, the Cripto-1:ALK2 heteromultimer comprises a polypeptide that is at least 70%, 75%, 80%, 85%, 90%, 91%, 92%, 93%, 94%, 95%, 95%, 96%, 97%, 98%, 99%, or 100% identical to the amino acid sequence of any one of SEQ ID NOs: SEQ ID NO: 18 or 19. In some embodiments the Cripto-1:ALK2 heteromultimer comprises a polypeptide that is at least 70%, 75%, 80%, 85%, 90%, 91%, 92%, 93%, 94%, 95%, 95%, 96%, 97%, 98%, 99%, or 100% identical to a polypeptide that begins at any one of amino acids of 21-35 of SEQ ID NO: 18 and ends at any one of amino acids 99-123 of SEQ ID NO: 18. In certain preferred embodiments, Cripto-1:ALK2 heteromultimers are soluble. In some embodiments, an Cripto-1:ALK2 heteromultimer of the disclosure binds to one or more TGF-beta superfamily ligands (e.g., binds to one or more TGF-beta superfamily ligands with a K_{D} of at least 1×10⁻⁷). In some embodiments, an Cripto-1:ALK2 heteromultimer of the disclosure inhibits one or more TGF-beta superfamily ligands (e.g., inhibits Smad signaling). Heteromultimer-ligand binding and inhibition may be determined using a variety of assays including, for example, those described herein (e.g., in vitro binding and/or cell-based signaling assays). In some embodiments, an Cripto-1:ALK2 heteromultimer of the disclosure has a different TGF-beta ligand binding and/or inhibition profile (specificity) compared to a corresponding homomultimer (e.g., Cripto-1 and ALK2 homomultimers). In some embodiments, an Cripto-1:ALK2 heteromultimer of the disclosure is a heterodimer.

[0022] In certain aspects, the disclosure relates to heteromultimers that comprise at least one Cripto-1 polypeptide, which includes fragments, functional variants, and modified forms thereof, and at least one ALK3 polypeptide, which includes fragments, functional variants, and modified forms thereof. In some embodiments, the Cripto-1:ALK3 heteromultimer comprises a polypeptide that is at least 70%, 75%, 80%, 85%, 90%, 91%, 92%, 93%, 94%, 95%, 95%, 96%, 97%, 98%, 99%, or 100% identical to the amino acid sequence of any one of SEQ ID NOs: 513, 514, 517, or 518. In some embodiments, the Cripto-1:ALK3 heteromultimer comprises a polypeptide that is at least 70%, 75%, 80%, 85%, 90%, 91%, 92%, 93%, 94%, 95%, 95%, 96%, 97%, 98%, 99%, or 100% identical to a polypeptide that begins at any one of amino acids of 31-82 of SEQ ID NO: 513 and ends at any one of amino acids 172-188 of SEQ ID NO: 513. In some embodiments, the Cripto-1:ALK3 heteromultimer comprises a polypeptide that is at least 70%, 75%, 80%, 85%, 90%, 91%, 92%, 93%, 94%, 95%, 95%, 96%, 97%, 98%, 99%, or 100% identical to a polypeptide that begins at any one of amino acids of 15-66 of SEQ ID NO: 517, and ends at any one of amino acids 156-172 of SEQ ID NO: 517. In some embodiments, the Cripto-1:ALK3 heteromultimer comprises a polypeptide that is at least 70%, 75%, 80%, 85%, 90%, 91%, 92%, 93%, 94%, 95%, 95%, 96%, 97%, 98%, 99%, or 100% identical to the amino acid sequence of any one of SEQ ID NOs: SEQ ID NO: 22 or 23. In some embodiments the Cripto-1:ALK3 heteromultimer comprises a polypeptide that is at least 70%, 75%, 80%, 85%, 90%, 91%, 92%, 93%, 94%, 95%, 95%, 96%, 97%, 98%, 99%, or 100% identical to a polypeptide that begins at any one of amino acids of 24-61 of SEQ ID NO: 22 and ends at any one of amino acids 130-152 of SEQ ID NO: 22. In certain preferred embodiments, Cripto-1:ALK3 heteromultimers are soluble. In some embodiments, an Cripto-1:ALK3 heteromultimer of the disclosure binds to one or more TGF-beta superfamily ligands (e.g., binds to one or more TGF-beta superfamily ligands with a K_{D} of at least 1×10⁻⁷). In some embodiments, an Cripto-1:ALK3 heteromultimer of the disclosure inhibits one or more TGF-beta superfamily ligands (e.g., inhibits Smad signaling). Heteromultimer-ligand binding and inhibition may be determined using a variety of assays including, for example, those described herein (e.g., in vitro binding and/or cell-based signaling assays). In some embodiments, an Cripto-1:ALK3 heteromultimer of the disclosure has a different TGF-beta ligand binding and/or inhibition profile (specificity) compared to a corresponding homomultimer (e.g., Cripto-1 and ALK3 homomultimers). In some embodiments, an Cripto-1:ALK3 heteromultimer of the disclosure is a heterodimer.

[0023] In certain aspects, the disclosure relates to heteromultimers that comprise at least one Cripto-1 polypeptide, which includes fragments, functional variants, and modified forms thereof, and at least one ALK4 polypeptide, which includes fragments, functional variants, and modified forms thereof. In some embodiments, the Cripto-1:ALK4 heteromultimer comprises a polypeptide that is at least 70%, 75%, 80%, 85%, 90%, 91%, 92%, 93%, 94%, 95%, 95%, 96%, 97%, 98%, 99%, or 100% identical to the amino acid sequence of any one of SEQ ID NOs: 513, 514, 517, or 518. In some embodiments, the Cripto-1:ALK4 heteromultimer comprises a polypeptide that is at least 70%, 75%, 80%, 85%, 90%, 91%, 92%, 93%, 94%, 95%, 95%, 96%, 97%, 98%, 99%, or 100% identical to a polypeptide that begins at any one of amino acids of 31-82 of SEQ ID NO: 513 and ends at any one of amino acids 172-188 of SEQ ID NO: 513. In some embodiments, the Cripto-1:ALK4 heteromultimer comprises a polypeptide that is at least 70%, 75%, 80%, 85%, 90%, 91%, 92%, 93%, 94%, 95%, 95%, 96%, 97%, 98%, 99%, or 100% identical to a polypeptide that begins at any one of amino acids of 15-66 of SEQ ID NO: 517, and ends at any one of amino acids 156-172 of SEQ ID NO: 517. In some embodiments, the Cripto-1:ALK4 heteromultimer comprises a polypeptide that is at least 70%, 75%, 80%, 85%, 90%, 91%, 92%, 93%, 94%, 95%, 95%, 96%, 97%, 98%, 99%, or 100% identical to the amino acid sequence of any one of SEQ ID NOs: SEQ ID NO: 26, 27, 83, or 84. In some embodiments the Cripto-1:ALK4 heteromultimer comprises a polypeptide that is at least 70%, 75%, 80%, 85%, 90%, 91%, 92%, 93%, 94%, 95%, 95%, 96%, 97%, 98%, 99%, or 100% identical to a polypeptide that begins at any one of amino acids of 24-34 of SEQ ID NO: 26 and ends at any one of amino acids 101-126 of SEQ ID NO: 26. In some embodiments the Cripto-1:ALK4 heteromultimer comprises a polypeptide that is at least 70%, 75%, 80%, 85%, 90%, 91%, 92%, 93%, 94%, 95%, 95%, 96%, 97%, 98%, 99%, or 100% identical to a polypeptide that begins at any one of amino acids of 24-34 of SEQ ID NO: 83 and ends at any one of amino acids 101-126 of SEQ ID NO: 83. In certain preferred embodiments, Cripto-1:ALK4 heteromultimers are soluble. In some embodiments, a Cripto-1:ALK4 heteromultimer of the disclosure binds to one or more TGF-beta superfamily ligands (e.g., binds to one or more TGF-beta superfamily ligands with a K_{D} of at least 1×10⁻⁷). In some embodiments, a Cripto-1:ALK4 heteromultimer of the disclosure inhibits one or more TGF-beta superfamily ligands (e.g., inhibits Smad signaling). Heteromultimer-ligand binding and inhibition may be determined using a variety of assays including, for example, those described herein (e.g., in vitro binding and/or cell-based signaling assays). In some embodiments, a Cripto-1:ALK4 heteromultimer of the disclosure has a different TGF-beta ligand binding and/or inhibition profile (specificity) compared to a corresponding homomultimer (e.g., Cripto-1 and ALK4 homomultimers). In some embodiments, a Cripto-1:ALK4 heteromultimer of the disclosure is a heterodimer.

[0024] In certain aspects, the disclosure relates to heteromultimers that comprise at least one Cripto-1 polypeptide, which includes fragments, functional variants, and modified forms thereof, and at least one ALK5 polypeptide, which includes fragments, functional variants, and modified forms thereof. In some embodiments, the Cripto-1:ALK5 heteromultimer comprises a polypeptide that is at least 70%, 75%, 80%, 85%, 90%, 91%, 92%, 93%, 94%, 95%, 95%, 96%, 97%, 98%, 99%, or 100% identical to the amino acid sequence of any one of SEQ ID NOs: 513, 514, 517, or 518. In some embodiments, the Cripto-1:ALK5 heteromultimer comprises a polypeptide that is at least 70%, 75%, 80%, 85%, 90%, 91%, 92%, 93%, 94%, 95%, 95%, 96%, 97%, 98%, 99%, or 100% identical to a polypeptide that begins at any one of amino acids of 31-82 of SEQ ID NO: 513 and ends at any one of amino acids 172-188 of SEQ ID NO: 513. In some embodiments, the Cripto-1:ALK5 heteromultimer comprises a polypeptide that is at least 70%, 75%, 80%, 85%, 90%, 91%, 92%, 93%, 94%, 95%, 95%, 96%, 97%, 98%, 99%, or 100% identical to a polypeptide that begins at any one of amino acids of 15-66 of SEQ ID NO: 517, and ends at any one of amino acids 156-172 of SEQ ID NO: 517. In some embodiments, the Cripto-1:ALK5 heteromultimer comprises a polypeptide that is at least 70%, 75%, 80%, 85%, 90%, 91%, 92%, 93%, 94%, 95%, 95%, 96%, 97%, 98%, 99%, or 100% identical to the amino acid sequence of any one of SEQ ID NOs: SEQ ID NO: 30, 31, 87, or 88. In some embodiments the Cripto-1:ALK5 heteromultimer comprises a polypeptide that is at least 70%, 75%, 80%, 85%, 90%, 91%, 92%, 93%, 94%, 95%, 95%, 96%, 97%, 98%, 99%, or 100% identical to a polypeptide that begins at any one of amino acids of 25-36 of SEQ ID NO: 30 and ends at any one of amino acids 101-126 of SEQ ID NO: 30. In some embodiments the Cripto-1:ALK5 heteromultimer comprises a polypeptide that is at least 70%, 75%, 80%, 85%, 90%, 91%, 92%, 93%, 94%, 95%, 95%, 96%, 97%, 98%, 99%, or 100% identical to a polypeptide that begins at any one of amino acids of 25-36 of SEQ ID NO: 87 and ends at any one of amino acids 101-130 of SEQ ID NO: 87. In certain preferred embodiments, Cripto-1:ALK5 heteromultimers are soluble. In some embodiments, a Cripto-1:ALK5 heteromultimer of the disclosure binds to one or more TGF-beta superfamily ligands (e.g., binds to one or more TGF-beta superfamily ligands with a K_{D} of at least 1×10⁻⁷). In some embodiments, a Cripto-1:ALK5 heteromultimer of the disclosure inhibits one or more TGF-beta superfamily ligands (e.g., inhibits Smad signaling). Heteromultimer-ligand binding and inhibition may be determined using a variety of assays including, for example, those described herein (e.g., in vitro binding and/or cell-based signaling assays). In some embodiments, a Cripto-1:ALK5 heteromultimer of the disclosure has a different TGF-beta ligand binding and/or inhibition profile (specificity) compared to a corresponding homomultimer (e.g., Cripto-1 and ALK5 homomultimers). In some embodiments, a Cripto-1:ALK5 heteromultimer of the disclosure is a heterodimer.

[0025] In certain aspects, the disclosure relates to heteromultimers that comprise at least one Cripto-1 polypeptide, which includes fragments, functional variants, and modified forms thereof, and at least one ALK6 polypeptide, which includes fragments, functional variants, and modified forms thereof. In some embodiments, the Cripto-1:ALK6 heteromultimer comprises a polypeptide that is at least 70%, 75%, 80%, 85%, 90%, 91%, 92%, 93%, 94%, 95%, 95%, 96%, 97%, 98%, 99%, or 100% identical to the amino acid sequence of any one of SEQ ID NOs: 513, 514, 517, or 518. In some embodiments, the Cripto-1:ALK6 heteromultimer comprises a polypeptide that is at least 70%, 75%, 80%, 85%, 90%, 91%, 92%, 93%, 94%, 95%, 95%, 96%, 97%, 98%, 99%, or 100% identical to a polypeptide that begins at any one of amino acids of 31-82 of SEQ ID NO: 513 and ends at any one of amino acids 172-188 of SEQ ID NO: 513. In some embodiments, the Cripto-1:ALK6 heteromultimer comprises a polypeptide that is at least 70%, 75%, 80%, 85%, 90%, 91%, 92%, 93%, 94%, 95%, 95%, 96%, 97%, 98%, 99%, or 100% identical to a polypeptide that begins at any one of amino acids of 15-66 of SEQ ID NO: 517, and ends at any one of amino acids 156-172 of SEQ ID NO: 517. In some embodiments, the Cripto-1:ALK6 heteromultimer comprises a polypeptide that is at least 70%, 75%, 80%, 85%, 90%, 91%, 92%, 93%, 94%, 95%, 95%, 96%, 97%, 98%, 99%, or 100% identical to the amino acid sequence of any one of SEQ ID NOs: SEQ ID NO: 34, 35, 91, or 92. In some embodiments the Cripto-1:ALK6 heteromultimer comprises a polypeptide that is at least 70%, 75%, 80%, 85%, 90%, 91%, 92%, 93%, 94%, 95%, 95%, 96%, 97%, 98%, 99%, or 100% identical to a polypeptide that begins at any one of amino acids of 14-32 of SEQ ID NO: 34 and ends at any one of amino acids 102-126 of SEQ ID NO: 34. In some embodiments the Cripto-1:ALK6 heteromultimer comprises a polypeptide that is at least 70%, 75%, 80%, 85%, 90%, 91%, 92%, 93%, 94%, 95%, 95%, 96%, 97%, 98%, 99%, or 100% identical to a polypeptide that begins at any one of amino acids of 26-62 of SEQ ID NO: 91 and ends at any one of amino acids 132-156 of SEQ ID NO: 91. In certain preferred embodiments, Cripto-1:ALK6 heteromultimers are soluble. In some embodiments, a Cripto-1:ALK6 heteromultimer of the disclosure binds to one or more TGF-beta superfamily ligands (e.g., binds to one or more TGF-beta superfamily ligands with a K_{D} of at least 1×10⁻⁷). In some embodiments, a Cripto-1:ALK6 heteromultimer of the disclosure inhibits one or more TGF-beta superfamily ligands (e.g., inhibits Smad signaling). Heteromultimer-ligand binding and inhibition may be determined using a variety of assays including, for example, those described herein (e.g., in vitro binding and/or cell-based signaling assays). In some embodiments, a Cripto-1:ALK6 heteromultimer of the disclosure has a different TGF-beta ligand binding and/or inhibition profile (specificity) compared to a corresponding homomultimer (e.g., Cripto-1 and 6 homomultimers). In some embodiments, a Cripto-1:ALK6 heteromultimer of the disclosure is a heterodimer.

[0026] In certain aspects, the disclosure relates to heteromultimers that comprise at least one Cripto-1 polypeptide, which includes fragments, functional variants, and modified forms thereof, and at least one ALK7 polypeptide, which includes fragments, functional variants, and modified forms thereof. In some embodiments, the Cripto-1:ALK7 heteromultimer comprises a polypeptide that is at least 70%, 75%, 80%, 85%, 90%, 91%, 92%, 93%, 94%, 95%, 95%, 96%, 97%, 98%, 99%, or 100% identical to the amino acid sequence of any one of SEQ ID NOs: 513, 514, 517, or 518. In some embodiments, the Cripto-1:ALK7 heteromultimer comprises a polypeptide that is at least 70%, 75%, 80%, 85%, 90%, 91%, 92%, 93%, 94%, 95%, 95%, 96%, 97%, 98%, 99%, or 100% identical to a polypeptide that begins at any one of amino acids of 31-82 of SEQ ID NO: 513 and ends at any one of amino acids 172-188 of SEQ ID NO: 513. In some embodiments, the Cripto-1:ALK7 heteromultimer comprises a polypeptide that is at least 70%, 75%, 80%, 85%, 90%, 91%, 92%, 93%, 94%, 95%, 95%, 96%, 97%, 98%, 99%, or 100% identical to a polypeptide that begins at any one of amino acids of 15-66 of SEQ ID NO: 517, and ends at any one of amino acids 156-172 of SEQ ID NO: 517. In some embodiments, the Cripto-1:ALK7 heteromultimer comprises a polypeptide that is at least 70%, 75%, 80%, 85%, 90%, 91%, 92%, 93%, 94%, 95%, 95%, 96%, 97%, 98%, 99%, or 100% identical to the amino acid sequence of any one of SEQ ID NOs: SEQ ID NO: 38, 39, 301, 302, 305, 306, 309, 310, or 313. In some embodiments the Cripto-1:ALK7 heteromultimer comprises a polypeptide that is at least 70%, 75%, 80%, 85%, 90%, 91%, 92%, 93%, 94%, 95%, 95%, 96%, 97%, 98%, 99%, or 100% identical to a polypeptide that begins at any one of amino acids of 21-28 of SEQ ID NO: 38 and ends at any one of amino acids 92-113 of SEQ ID NO: 38. In some embodiments the Cripto-1:ALK7 heteromultimer comprises a polypeptide that is at least 70%, 75%, 80%, 85%, 90%, 91%, 92%, 93%, 94%, 95%, 95%, 96%, 97%, 98%, 99%, or 100% identical to a polypeptide that begins at any one of amino acids of 1-13 of SEQ ID NO: 301 and ends at any one of amino acids 42-63 of SEQ ID NO: 301. In some embodiments the Cripto-1:ALK7 heteromultimer comprises a polypeptide that is at least 70%, 75%, 80%, 85%, 90%, 91%, 92%, 93%, 94%, 95%, 95%, 96%, 97%, 98%, 99%, or 100% identical to a polypeptide that begins at any one of amino acids of 21-28 of SEQ ID NO: 305 and ends at any one of amino acids 411-413 of SEQ ID NO: 305. In some embodiments the Cripto-1:ALK7 heteromultimer comprises a polypeptide that is at least 70%, 75%, 80%, 85%, 90%, 91%, 92%, 93%, 94%, 95%, 95%, 96%, 97%, 98%, 99%, or 100% identical to a polypeptide that begins at any one of amino acids of 21-28 of SEQ ID NO: 309 and ends at any one of amino acids 334-336 of SEQ ID NO: 309. In certain preferred embodiments, Cripto-1:ALK7 heteromultimers are soluble. In some embodiments, a Cripto-1:ALK7 heteromultimer of the disclosure binds to one or more TGF-beta superfamily ligands (e.g., binds to one or more TGF-beta superfamily ligands with a K_{D} of at least 1×10⁻⁷). In some embodiments, a Cripto-1:ALK7 heteromultimer of the disclosure inhibits one or more TGF-beta superfamily ligands (e.g., inhibits Smad signaling). Heteromultimer-ligand binding and inhibition may be determined using a variety of assays including, for example, those described herein (e.g., in vitro binding and/or cell-based signaling assays). In some embodiments, a Cripto-1:ALK7 heteromultimer of the disclosure has a different TGF-beta ligand binding and/or inhibition profile (specificity) compared to a corresponding homomultimer (e.g., Cripto-1 and ALK7 homomultimers). In some embodiments, a Cripto-1:ALK7 heteromultimer of the disclosure is a heterodimer.

[0027] In certain aspects, the disclosure relates to heteromultimers that comprise at least one Cryptic protein polypeptide, which includes fragments, functional variants, and modified forms thereof, and at least one ALK1 polypeptide, which includes fragments, functional variants, and modified forms thereof. In some embodiments, the Cryptic protein:ALK1 heteromultimer comprises a polypeptide that is at least 70%, 75%, 80%, 85%, 90%, 91%, 92%, 93%, 94%, 95%, 95%, 96%, 97%, 98%, 99%, or 100% identical to the amino acid sequence of any one of SEQ ID NOs: 521, 522, 525, 526, 529, or 530. In some embodiments, the Cryptic protein:ALK1 heteromultimer comprises a polypeptide that is at least 70%, 75%, 80%, 85%, 90%, 91%, 92%, 93%, 94%, 95%, 95%, 96%, 97%, 98%, 99%, or 100% identical to a polypeptide that begins at any one of amino acids of 26-90 of SEQ ID NO: 521 and ends at any one of amino acids 157-233 of SEQ ID NO: 521. In some embodiments, the Cryptic protein:ALK1 heteromultimer comprises a polypeptide that is at least 70%, 75%, 80%, 85%, 90%, 91%, 92%, 93%, 94%, 95%, 95%, 96%, 97%, 98%, 99%, or 100% identical to a polypeptide that begins at any one of amino acids of 26-30 of SEQ ID NO: 525 and ends at any one of amino acids 82-191 of SEQ ID NO: 525. In some embodiments, the Cryptic protein:ALK1 heteromultimer comprises a polypeptide that is at least 70%, 75%, 80%, 85%, 90%, 91%, 92%, 93%, 94%, 95%, 95%, 96%, 97%, 98%, 99%, or 100% identical to a polypeptide that begins at any one of amino acids of 26-30 of SEQ ID NO: 529, and ends at any one of amino acids 82-148 of SEQ ID NO: 529. In some embodiments, the Cryptic protein:ALK1 heteromultimer comprises a polypeptide that is at least 70%, 75%, 80%, 85%, 90%, 91%, 92%, 93%, 94%, 95%, 95%, 96%, 97%, 98%, 99%, or 100% identical to the amino acid sequence of any one of SEQ ID NOs: 14 or 15. In some embodiments, the Cryptic protein:ALK1 heteromultimer comprises a polypeptide that is at least 70%, 75%, 80%, 85%, 90%, 91%, 92%, 93%, 94%, 95%, 95%, 96%, 97%, 98%, 99%, or 100% identical to a polypeptide that begins at any one of amino acids of 22-34 of SEQ ID NO: 14 and ends at any one of amino acids 95-118 of SEQ ID NO: 14. In certain preferred embodiments, Cryptic protein:ALK1 heteromultimers are soluble. In some embodiments, a Cryptic protein:ALK1 heteromultimer of the disclosure binds to one or more TGF-beta superfamily ligands (e.g., binds to one or more TGF-beta superfamily ligands with a K_{D} of at least 1×10⁻⁷). In some embodiments, a Cryptic protein:ALK1 heteromultimer of the disclosure inhibits one or more TGF-beta superfamily ligands (e.g., inhibits Smad signaling). Heteromultimer-ligand binding and inhibition may be determined using a variety of assays including, for example, those described herein (e.g., in vitro binding and/or cell-based signaling assays). In some embodiments, a Cryptic protein:ALK1 heteromultimer of the disclosure has a different TGF-beta ligand binding and/or inhibition profile (specificity) compared to a corresponding homomultimer (e.g., Cryptic protein and ALK1 homomultimers). In some embodiments, a Cryptic protein:ALK1 heteromultimer of the disclosure is a heterodimer.

[0028] In certain aspects, the disclosure relates to heteromultimers that comprise at least one Cryptic protein polypeptide, which includes fragments, functional variants, and modified forms thereof, and at least one ALK2 polypeptide, which includes fragments, functional variants, and modified forms thereof. In some embodiments, the Cryptic protein:ALK2 heteromultimer comprises a polypeptide that is at least 70%, 75%, 80%, 85%, 90%, 91%, 92%, 93%, 94%, 95%, 95%, 96%, 97%, 98%, 99%, or 100% identical to the amino acid sequence of any one of SEQ ID NOs: 521, 522, 525, 526, 529, or 530. In some embodiments, the Cryptic protein:ALK2 heteromultimer comprises a polypeptide that is at least 70%, 75%, 80%, 85%, 90%, 91%, 92%, 93%, 94%, 95%, 95%, 96%, 97%, 98%, 99%, or 100% identical to a polypeptide that begins at any one of amino acids of 26-90 of SEQ ID NO: 521 and ends at any one of amino acids 157-233 of SEQ ID NO: 521. In some embodiments, the Cryptic protein:ALK2 heteromultimer comprises a polypeptide that is at least 70%, 75%, 80%, 85%, 90%, 91%, 92%, 93%, 94%, 95%, 95%, 96%, 97%, 98%, 99%, or 100% identical to a polypeptide that begins at any one of amino acids of 26-30 of SEQ ID NO: 525 and ends at any one of amino acids 82-191 of SEQ ID NO: 525. In some embodiments, the Cryptic protein:ALK2 heteromultimer comprises a polypeptide that is at least 70%, 75%, 80%, 85%, 90%, 91%, 92%, 93%, 94%, 95%, 95%, 96%, 97%, 98%, 99%, or 100% identical to a polypeptide that begins at any one of amino acids of 26-30 of SEQ ID NO: 529, and ends at any one of amino acids 82-148 of SEQ ID NO: 529. In some embodiments, the Cryptic protein:ALK2 heteromultimer comprises a polypeptide that is at least 70%, 75%, 80%, 85%, 90%, 91%, 92%, 93%, 94%, 95%, 95%, 96%, 97%, 98%, 99%, or 100% identical to the amino acid sequence of any one of SEQ ID NOs: SEQ ID NO: 18 or 19. In some embodiments the Cryptic protein:ALK2 heteromultimer comprises a polypeptide that is at least 70%, 75%, 80%, 85%, 90%, 91%, 92%, 93%, 94%, 95%, 95%, 96%, 97%, 98%, 99%, or 100% identical to a polypeptide that begins at any one of amino acids of 21-35 of SEQ ID NO: 18 and ends at any one of amino acids 99-123 of SEQ ID NO: 18. In certain preferred embodiments, Cryptic protein:ALK2 heteromultimers are soluble. In some embodiments, a Cryptic protein:ALK2 heteromultimer of the disclosure binds to one or more TGF-beta superfamily ligands (e.g., binds to one or more TGF-beta superfamily ligands with a K_{D} of at least 1×10⁻⁷). In some embodiments, a Cryptic protein:ALK2 heteromultimer of the disclosure inhibits one or more TGF-beta superfamily ligands (e.g., inhibits Smad signaling). Heteromultimer-ligand binding and inhibition may be determined using a variety of assays including, for example, those described herein (e.g., in vitro binding and/or cell-based signaling assays). In some embodiments, a Cryptic protein:ALK2 heteromultimer of the disclosure has a different TGF-beta ligand binding and/or inhibition profile (specificity) compared to a corresponding homomultimer (e.g., Cryptic protein and ALK2 homomultimers). In some embodiments, a Cryptic protein:ALK2 heteromultimer of the disclosure is a heterodimer.

[0029] In certain aspects, the disclosure relates to heteromultimers that comprise at least one Cryptic protein polypeptide, which includes fragments, functional variants, and modified forms thereof, and at least one ALK3 polypeptide, which includes fragments, functional variants, and modified forms thereof. In some embodiments, the Cryptic protein:ALK3 heteromultimer comprises a polypeptide that is at least 70%, 75%, 80%, 85%, 90%, 91%, 92%, 93%, 94%, 95%, 95%, 96%, 97%, 98%, 99%, or 100% identical to the amino acid sequence of any one of SEQ ID NOs: 521, 522, 525, 526, 529, or 530. In some embodiments, the Cryptic protein:ALK3 heteromultimer comprises a polypeptide that is at least 70%, 75%, 80%, 85%, 90%, 91%, 92%, 93%, 94%, 95%, 95%, 96%, 97%, 98%, 99%, or 100% identical to a polypeptide that begins at any one of amino acids of 26-90 of SEQ ID NO: 521 and ends at any one of amino acids 157-233 of SEQ ID NO: 521. In some embodiments, the Cryptic protein:ALK3 heteromultimer comprises a polypeptide that is at least 70%, 75%, 80%, 85%, 90%, 91%, 92%, 93%, 94%, 95%, 95%, 96%, 97%, 98%, 99%, or 100% identical to a polypeptide that begins at any one of amino acids of 26-30 of SEQ ID NO: 525 and ends at any one of amino acids 82-191 of SEQ ID NO: 525. In some embodiments, the Cryptic protein:ALK3 heteromultimer comprises a polypeptide that is at least 70%, 75%, 80%, 85%, 90%, 91%, 92%, 93%, 94%, 95%, 95%, 96%, 97%, 98%, 99%, or 100% identical to a polypeptide that begins at any one of amino acids of 26-30 of SEQ ID NO: 529, and ends at any one of amino acids 82-148 of SEQ ID NO: 529. In some embodiments, the Cryptic protein:ALK3 heteromultimer comprises a polypeptide that is at least 70%, 75%, 80%, 85%, 90%, 91%, 92%, 93%, 94%, 95%, 95%, 96%, 97%, 98%, 99%, or 100% identical to the amino acid sequence of any one of SEQ ID NOs: SEQ ID NO: 22 or 23. In some embodiments the Cryptic protein:ALK3 heteromultimer comprises a polypeptide that is at least 70%, 75%, 80%, 85%, 90%, 91%, 92%, 93%, 94%, 95%, 95%, 96%, 97%, 98%, 99%, or 100% identical to a polypeptide that begins at any one of amino acids of 24-61 of SEQ ID NO: 22 and ends at any one of amino acids 130-152 of SEQ ID NO: 22. In certain preferred embodiments, Cryptic protein:ALK3 heteromultimers are soluble. In some embodiments, a Cryptic protein:ALK3 heteromultimer of the disclosure binds to one or more TGF-beta superfamily ligands (e.g., binds to one or more TGF-beta superfamily ligands with a K_{D} of at least 1×10⁻⁷). In some embodiments, a Cryptic protein:ALK3 heteromultimer of the disclosure inhibits one or more TGF-beta superfamily ligands (e.g., inhibits Smad signaling). Heteromultimer-ligand binding and inhibition may be determined using a variety of assays including, for example, those described herein (e.g., in vitro binding and/or cell-based signaling assays). In some embodiments, a Cryptic protein:ALK3 heteromultimer of the disclosure has a different TGF-beta ligand binding and/or inhibition profile (specificity) compared to a corresponding homomultimer (e.g., Cryptic protein and ALK3 homomultimers). In some embodiments, a Cryptic protein:ALK3 heteromultimer of the disclosure is a heterodimer.

[0030] In certain aspects, the disclosure relates to heteromultimers that comprise at least one Cryptic protein polypeptide, which includes fragments, functional variants, and modified forms thereof, and at least one ALK4 polypeptide, which includes fragments, functional variants, and modified forms thereof. In some embodiments, the Cryptic protein:ALK4 heteromultimer comprises a polypeptide that is at least 70%, 75%, 80%, 85%, 90%, 91%, 92%, 93%, 94%, 95%, 95%, 96%, 97%, 98%, 99%, or 100% identical to the amino acid sequence of any one of SEQ ID NOs: 521, 522, 525, 526, 529, or 530. In some embodiments, the Cryptic protein:ALK4 heteromultimer comprises a polypeptide that is at least 70%, 75%, 80%, 85%, 90%, 91%, 92%, 93%, 94%, 95%, 95%, 96%, 97%, 98%, 99%, or 100% identical to a polypeptide that begins at any one of amino acids of 26-90 of SEQ ID NO: 521 and ends at any one of amino acids 157-233 of SEQ ID NO: 521. In some embodiments, the Cryptic protein:ALK4 heteromultimer comprises a polypeptide that is at least 70%, 75%, 80%, 85%, 90%, 91%, 92%, 93%, 94%, 95%, 95%, 96%, 97%, 98%, 99%, or 100% identical to a polypeptide that begins at any one of amino acids of 26-30 of SEQ ID NO: 525 and ends at any one of amino acids 82-191 of SEQ ID NO: 525. In some embodiments, the Cryptic protein:ALK4 heteromultimer comprises a polypeptide that is at least 70%, 75%, 80%, 85%, 90%, 91%, 92%, 93%, 94%, 95%, 95%, 96%, 97%, 98%, 99%, or 100% identical to a polypeptide that begins at any one of amino acids of 26-30 of SEQ ID NO: 529, and ends at any one of amino acids 82-148 of SEQ ID NO: 529. In some embodiments, the Cryptic protein:ALK4 heteromultimer comprises a polypeptide that is at least 70%, 75%, 80%, 85%, 90%, 91%, 92%, 93%, 94%, 95%, 95%, 96%, 97%, 98%, 99%, or 100% identical to the amino acid sequence of any one of SEQ ID NOs: SEQ ID NO: 26, 27, 83, or 84. In some embodiments the Cryptic protein:ALK4 heteromultimer comprises a polypeptide that is at least 70%, 75%, 80%, 85%, 90%, 91%, 92%, 93%, 94%, 95%, 95%, 96%, 97%, 98%, 99%, or 100% identical to a polypeptide that begins at any one of amino acids of 24-34 of SEQ ID NO: 26 and ends at any one of amino acids 101-126 of SEQ ID NO: 26. In some embodiments the Cryptic protein:ALK4 heteromultimer comprises a polypeptide that is at least 70%, 75%, 80%, 85%, 90%, 91%, 92%, 93%, 94%, 95%, 95%, 96%, 97%, 98%, 99%, or 100% identical to a polypeptide that begins at any one of amino acids of 24-34 of SEQ ID NO: 83 and ends at any one of amino acids 101-126 of SEQ ID NO: 83. In certain preferred embodiments, Cryptic protein:ALK4 heteromultimers are soluble. In some embodiments, a Cryptic protein:ALK4 heteromultimer of the disclosure binds to one or more TGF-beta superfamily ligands (e.g., binds to one or more TGF-beta superfamily ligands with a K_{D} of at least 1×10⁻⁷). In some embodiments, a Cryptic protein:ALK4 heteromultimer of the disclosure inhibits one or more TGF-beta superfamily ligands (e.g., inhibits Smad signaling). Heteromultimer-ligand binding and inhibition may be determined using a variety of assays including, for example, those described herein (e.g., in vitro binding and/or cell-based signaling assays). In some embodiments, a Cryptic protein:ALK4 heteromultimer of the disclosure has a different TGF-beta ligand binding and/or inhibition profile (specificity) compared to a corresponding homomultimer (e.g., Cryptic protein and ALK4 homomultimers). In some embodiments, a Cryptic protein:ALK4 heteromultimer of the disclosure is a heterodimer.

[0031] In certain aspects, the disclosure relates to heteromultimers that comprise at least one Cryptic protein polypeptide, which includes fragments, functional variants, and modified forms thereof, and at least one ALK5 polypeptide, which includes fragments, functional variants, and modified forms thereof. In some embodiments, the Cryptic protein:ALK5 heteromultimer comprises a polypeptide that is at least 70%, 75%, 80%, 85%, 90%, 91%, 92%, 93%, 94%, 95%, 95%, 96%, 97%, 98%, 99%, or 100% identical to the amino acid sequence of any one of SEQ ID NOs: 521, 522, 525, 526, 529, or 530. In some embodiments, the Cryptic protein:ALK5 heteromultimer comprises a polypeptide that is at least 70%, 75%, 80%, 85%, 90%, 91%, 92%, 93%, 94%, 95%, 95%, 96%, 97%, 98%, 99%, or 100% identical to a polypeptide that begins at any one of amino acids of 26-90 of SEQ ID NO: 521 and ends at any one of amino acids 157-233 of SEQ ID NO: 521. In some embodiments, the Cryptic protein:ALK5 heteromultimer comprises a polypeptide that is at least 70%, 75%, 80%, 85%, 90%, 91%, 92%, 93%, 94%, 95%, 95%, 96%, 97%, 98%, 99%, or 100% identical to a polypeptide that begins at any one of amino acids of 26-30 of SEQ ID NO: 525 and ends at any one of amino acids 82-191 of SEQ ID NO: 525. In some embodiments, the Cryptic protein:ALK5 heteromultimer comprises a polypeptide that is at least 70%, 75%, 80%, 85%, 90%, 91%, 92%, 93%, 94%, 95%, 95%, 96%, 97%, 98%, 99%, or 100% identical to a polypeptide that begins at any one of amino acids of 26-30 of SEQ ID NO: 529, and ends at any one of amino acids 82-148 of SEQ ID NO: 529. In some embodiments, the Cryptic protein:ALK5 heteromultimer comprises a polypeptide that is at least 70%, 75%, 80%, 85%, 90%, 91%, 92%, 93%, 94%, 95%, 95%, 96%, 97%, 98%, 99%, or 100% identical to the amino acid sequence of any one of SEQ ID NOs: SEQ ID NO: 30, 31, 87, or 88. In some embodiments the Cryptic protein:ALK5 heteromultimer comprises a polypeptide that is at least 70%, 75%, 80%, 85%, 90%, 91%, 92%, 93%, 94%, 95%, 95%, 96%, 97%, 98%, 99%, or 100% identical to a polypeptide that begins at any one of amino acids of 25-36 of SEQ ID NO: 30 and ends at any one of amino acids 101-126 of SEQ ID NO: 30. In some embodiments the Cryptic protein:ALK5 heteromultimer comprises a polypeptide that is at least 70%, 75%, 80%, 85%, 90%, 91%, 92%, 93%, 94%, 95%, 95%, 96%, 97%, 98%, 99%, or 100% identical to a polypeptide that begins at any one of amino acids of 25-36 of SEQ ID NO: 87 and ends at any one of amino acids 101-130 of SEQ ID NO: 87. In certain preferred embodiments, Cryptic protein:ALK5 heteromultimers are soluble. In some embodiments, a Cryptic protein:ALK5 heteromultimer of the disclosure binds to one or more TGF-beta superfamily ligands (e.g., binds to one or more TGF-beta superfamily ligands with a K_{D} of at least 1×10⁻⁷). In some embodiments, a Cryptic protein:ALK5 heteromultimer of the disclosure inhibits one or more TGF-beta superfamily ligands (e.g., inhibits Smad signaling). Heteromultimer-ligand binding and inhibition may be determined using a variety of assays including, for example, those described herein (e.g., in vitro binding and/or cell-based signaling assays). In some embodiments, a Cryptic protein:ALK5 heteromultimer of the disclosure has a different TGF-beta ligand binding and/or inhibition profile (specificity) compared to a corresponding homomultimer (e.g., Cryptic protein and ALK5 homomultimers). In some embodiments, a Cryptic protein:ALK5 heteromultimer of the disclosure is a heterodimer.

[0032] In certain aspects, the disclosure relates to heteromultimers that comprise at least one Cryptic protein polypeptide, which includes fragments, functional variants, and modified forms thereof, and at least one ALK6 polypeptide, which includes fragments, functional variants, and modified forms thereof. In some embodiments, the Cryptic protein:ALK6 heteromultimer comprises a polypeptide that is at least 70%, 75%, 80%, 85%, 90%, 91%, 92%, 93%, 94%, 95%, 95%, 96%, 97%, 98%, 99%, or 100% identical to the amino acid sequence of any one of SEQ ID NOs: 521, 522, 525, 526, 529, or 530. In some embodiments, the Cryptic protein:ALK6 heteromultimer comprises a polypeptide that is at least 70%, 75%, 80%, 85%, 90%, 91%, 92%, 93%, 94%, 95%, 95%, 96%, 97%, 98%, 99%, or 100% identical to a polypeptide that begins at any one of amino acids of 26-90 of SEQ ID NO: 521 and ends at any one of amino acids 157-233 of SEQ ID NO: 521. In some embodiments, the Cryptic protein:ALK6 heteromultimer comprises a polypeptide that is at least 70%, 75%, 80%, 85%, 90%, 91%, 92%, 93%, 94%, 95%, 95%, 96%, 97%, 98%, 99%, or 100% identical to a polypeptide that begins at any one of amino acids of 26-30 of SEQ ID NO: 525 and ends at any one of amino acids 82-191 of SEQ ID NO: 525. In some embodiments, the Cryptic protein:ALK6 heteromultimer comprises a polypeptide that is at least 70%, 75%, 80%, 85%, 90%, 91%, 92%, 93%, 94%, 95%, 95%, 96%, 97%, 98%, 99%, or 100% identical to a polypeptide that begins at any one of amino acids of 26-30 of SEQ ID NO: 529, and ends at any one of amino acids 82-148 of SEQ ID NO: 529. In some embodiments, the Cryptic protein:ALK6 heteromultimer comprises a polypeptide that is at least 70%, 75%, 80%, 85%, 90%, 91%, 92%, 93%, 94%, 95%, 95%, 96%, 97%, 98%, 99%, or 100% identical to the amino acid sequence of any one of SEQ ID NOs: SEQ ID NO: 34, 35, 91, or 92. In some embodiments the Cryptic protein:ALK6 heteromultimer comprises a polypeptide that is at least 70%, 75%, 80%, 85%, 90%, 91%, 92%, 93%, 94%, 95%, 95%, 96%, 97%, 98%, 99%, or 100% identical to a polypeptide that begins at any one of amino acids of 14-32 of SEQ ID NO: 34 and ends at any one of amino acids 102-126 of SEQ ID NO: 34. In some embodiments the Cryptic protein:ALK6 heteromultimer comprises a polypeptide that is at least 70%, 75%, 80%, 85%, 90%, 91%, 92%, 93%, 94%, 95%, 95%, 96%, 97%, 98%, 99%, or 100% identical to a polypeptide that begins at any one of amino acids of 26-62 of SEQ ID NO: 91 and ends at any one of amino acids 132-156 of SEQ ID NO: 91. In certain preferred embodiments, Cryptic protein:ALK6 heteromultimers are soluble. In some embodiments, a Cryptic protein:ALK6 heteromultimer of the disclosure binds to one or more TGF-beta superfamily ligands (e.g., binds to one or more TGF-beta superfamily ligands with a K_{D} of at least 1×10⁻⁷). In some embodiments, a Cryptic protein:ALK6 heteromultimer of the disclosure inhibits one or more TGF-beta superfamily ligands (e.g., inhibits Smad signaling). Heteromultimer-ligand binding and inhibition may be determined using a variety of assays including, for example, those described herein (e.g., in vitro binding and/or cell-based signaling assays). In some embodiments, a Cryptic protein:ALK6 heteromultimer of the disclosure has a different TGF-beta ligand binding and/or inhibition profile (specificity) compared to a corresponding homomultimer (e.g., Cryptic protein and ALK6 homomultimers). In some embodiments, a Cryptic protein:ALK6 heteromultimer of the disclosure is a heterodimer.

[0033] In certain aspects, the disclosure relates to heteromultimers that comprise at least one Cryptic protein polypeptide, which includes fragments, functional variants, and modified forms thereof, and at least one ALK7 polypeptide, which includes fragments, functional variants, and modified forms thereof. In some embodiments, the Cryptic protein:ALK7 heteromultimer comprises a polypeptide that is at least 70%, 75%, 80%, 85%, 90%, 91%, 92%, 93%, 94%, 95%, 95%, 96%, 97%, 98%, 99%, or 100% identical to the amino acid sequence of any one of SEQ ID NOs: 521, 522, 525, 526, 529, or 530. In some embodiments, the Cryptic protein:ALK7 heteromultimer comprises a polypeptide that is at least 70%, 75%, 80%, 85%, 90%, 91%, 92%, 93%, 94%, 95%, 95%, 96%, 97%, 98%, 99%, or 100% identical to a polypeptide that begins at any one of amino acids of 26-90 of SEQ ID NO: 521 and ends at any one of amino acids 157-233 of SEQ ID NO: 521. In some embodiments, the Cryptic protein:ALK7 heteromultimer comprises a polypeptide that is at least 70%, 75%, 80%, 85%, 90%, 91%, 92%, 93%, 94%, 95%, 95%, 96%, 97%, 98%, 99%, or 100% identical to a polypeptide that begins at any one of amino acids of 26-30 of SEQ ID NO: 525 and ends at any one of amino acids 82-191 of SEQ ID NO: 525. In some embodiments, the Cryptic protein:ALK7 heteromultimer comprises a polypeptide that is at least 70%, 75%, 80%, 85%, 90%, 91%, 92%, 93%, 94%, 95%, 95%, 96%, 97%, 98%, 99%, or 100% identical to a polypeptide that begins at any one of amino acids of 26-30 of SEQ ID NO: 529, and ends at any one of amino acids 82-148 of SEQ ID NO: 529. In some embodiments, the Cryptic protein:ALK7 heteromultimer comprises a polypeptide that is at least 70%, 75%, 80%, 85%, 90%, 91%, 92%, 93%, 94%, 95%, 95%, 96%, 97%, 98%, 99%, or 100% identical to the amino acid sequence of any one of SEQ ID NOs: SEQ ID NO: 38, 39, 301, 302, 305, 306, 309, 310, or 313. In some embodiments the Cryptic protein:ALK7 heteromultimer comprises a polypeptide that is at least 70%, 75%, 80%, 85%, 90%, 91%, 92%, 93%, 94%, 95%, 95%, 96%, 97%, 98%, 99%, or 100% identical to a polypeptide that begins at any one of amino acids of 21-28 of SEQ ID NO: 38 and ends at any one of amino acids 92-113 of SEQ ID NO: 38. In some embodiments the Cryptic protein:ALK7 heteromultimer comprises a polypeptide that is at least 70%, 75%, 80%, 85%, 90%, 91%, 92%, 93%, 94%, 95%, 95%, 96%, 97%, 98%, 99%, or 100% identical to a polypeptide that begins at any one of amino acids of 1-13 of SEQ ID NO: 301 and ends at any one of amino acids 42-63 of SEQ ID NO: 301. In some embodiments the Cryptic protein:ALK7 heteromultimer comprises a polypeptide that is at least 70%, 75%, 80%, 85%, 90%, 91%, 92%, 93%, 94%, 95%, 95%, 96%, 97%, 98%, 99%, or 100% identical to a polypeptide that begins at any one of amino acids of 21-28 of SEQ ID NO: 305 and ends at any one of amino acids 411-413 of SEQ ID NO: 305. In some embodiments the Cryptic protein:ALK7 heteromultimer comprises a polypeptide that is at least 70%, 75%, 80%, 85%, 90%, 91%, 92%, 93%, 94%, 95%, 95%, 96%, 97%, 98%, 99%, or 100% identical to a polypeptide that begins at any one of amino acids of 21-28 of SEQ ID NO: 309 and ends at any one of amino acids 334-336 of SEQ ID NO: 309. In certain preferred embodiments, Cryptic protein:ALK7 heteromultimers are soluble. In some embodiments, a Cryptic protein:ALK7 heteromultimer of the disclosure binds to one or more TGF-beta superfamily ligands (e.g., binds to one or more TGF-beta superfamily ligands with a K_{D} of at least 1×10⁻⁷). In some embodiments, a Cryptic protein:ALK7 heteromultimer of the disclosure inhibits one or more TGF-beta superfamily ligands (e.g., inhibits Smad signaling). Heteromultimer-ligand binding and inhibition may be determined using a variety of assays including, for example, those described herein (e.g., in vitro binding and/or cell-based signaling assays). In some embodiments, a Cryptic protein:ALK7 heteromultimer of the disclosure has a different TGF-beta ligand binding and/or inhibition profile (specificity) compared to a corresponding homomultimer (e.g., Cryptic protein and ALK7 homomultimers). In some embodiments, a Cryptic protein:ALK7 heteromultimer of the disclosure is a heterodimer.

[0034] In certain aspects, the disclosure relates to heteromultimers that comprise at least one Cryptic family protein 1B polypeptide, which includes fragments, functional variants, and modified forms thereof, and at least one ALK1 polypeptide, which includes fragments, functional variants, and modified forms thereof. In some embodiments, the Cryptic family protein 1B:ALK1 heteromultimer comprises a polypeptide that is at least 70%, 75%, 80%, 85%, 90%, 91%, 92%, 93%, 94%, 95%, 95%, 96%, 97%, 98%, 99%, or 100% identical to the amino acid sequence of any one of SEQ ID NOs: 533 or 534. In some embodiments, the Cryptic family protein 1B:ALK1 heteromultimer comprises a polypeptide that is at least 70%, 75%, 80%, 85%, 90%, 91%, 92%, 93%, 94%, 95%, 95%, 96%, 97%, 98%, 99%, or 100% identical to a polypeptide that begins at any one of amino acids of 26-30 of SEQ ID NO: 533 and ends at any one of amino acids 82-223 of SEQ ID NO: 533. In some embodiments, the Cryptic family protein 1B:ALK1 heteromultimer comprises a polypeptide that is at least 70%, 75%, 80%, 85%, 90%, 91%, 92%, 93%, 94%, 95%, 95%, 96%, 97%, 98%, 99%, or 100% identical to the amino acid sequence of any one of SEQ ID NOs: 14 or 15. In some embodiments, the Cryptic family protein 1B:ALK1 heteromultimer comprises a polypeptide that is at least 70%, 75%, 80%, 85%, 90%, 91%, 92%, 93%, 94%, 95%, 95%, 96%, 97%, 98%, 99%, or 100% identical to a polypeptide that begins at any one of amino acids of 22-34 of SEQ ID NO: 14 and ends at any one of amino acids 95-118 of SEQ ID NO: 14. In certain preferred embodiments, Cryptic family protein 1B:ALK1 heteromultimers are soluble. In some embodiments, a Cryptic family protein 1B:ALK1 heteromultimer of the disclosure binds to one or more TGF-beta superfamily ligands (e.g., binds to one or more TGF-beta superfamily ligands with a K_{D} of at least 1×10⁻⁷). In some embodiments, a Cryptic family protein 1B:ALK1 heteromultimer of the disclosure inhibits one or more TGF-beta superfamily ligands (e.g., inhibits Smad signaling). Heteromultimer-ligand binding and inhibition may be determined using a variety of assays including, for example, those described herein (e.g., in vitro binding and/or cell-based signaling assays). In some embodiments, a Cryptic family protein 1B:ALK1 heteromultimer of the disclosure has a different TGF-beta ligand binding and/or inhibition profile (specificity) compared to a corresponding homomultimer (e.g., Cryptic family protein 1B and ALK1 homomultimers). In some embodiments, a Cryptic family protein 1B:ALK1 heteromultimer of the disclosure is a heterodimer.

[0035] In certain aspects, the disclosure relates to heteromultimers that comprise at least one Cryptic family protein 1B polypeptide, which includes fragments, functional variants, and modified forms thereof, and at least one ALK2 polypeptide, which includes fragments, functional variants, and modified forms thereof. In some embodiments, the Cryptic family protein 1B:ALK2 heteromultimer comprises a polypeptide that is at least 70%, 75%, 80%, 85%, 90%, 91%, 92%, 93%, 94%, 95%, 95%, 96%, 97%, 98%, 99%, or 100% identical to the amino acid sequence of any one of SEQ ID NOs: 533 or 534. In some embodiments, the Cryptic family protein 1B:ALK2 heteromultimer comprises a polypeptide that is at least 70%, 75%, 80%, 85%, 90%, 91%, 92%, 93%, 94%, 95%, 95%, 96%, 97%, 98%, 99%, or 100% identical to a polypeptide that begins at any one of amino acids of 26-30 of SEQ ID NO: 533 and ends at any one of amino acids 82-223 of SEQ ID NO: 533. In some embodiments, the Cryptic family protein 1B:ALK2 heteromultimer comprises a polypeptide that is at least 70%, 75%, 80%, 85%, 90%, 91%, 92%, 93%, 94%, 95%, 95%, 96%, 97%, 98%, 99%, or 100% identical to the amino acid sequence of any one of SEQ ID NOs: SEQ ID NO: 18 or 19. In some embodiments the Cryptic family protein 1B:ALK2 heteromultimer comprises a polypeptide that is at least 70%, 75%, 80%, 85%, 90%, 91%, 92%, 93%, 94%, 95%, 95%, 96%, 97%, 98%, 99%, or 100% identical to a polypeptide that begins at any one of amino acids of 21-35 of SEQ ID NO: 18 and ends at any one of amino acids 99-123 of SEQ ID NO: 18. In certain preferred embodiments, Cryptic family protein 1B:ALK2 heteromultimers are soluble. In some embodiments, a Cryptic family protein 1B:ALK2 heteromultimer of the disclosure binds to one or more TGF-beta superfamily ligands (e.g., binds to one or more TGF-beta superfamily ligands with a K_{D} of at least 1×10⁻⁷). In some embodiments, a Cryptic family protein 1B:ALK2 heteromultimer of the disclosure inhibits one or more TGF-beta superfamily ligands (e.g., inhibits Smad signaling). Heteromultimer-ligand binding and inhibition may be determined using a variety of assays including, for example, those described herein (e.g., in vitro binding and/or cell-based signaling assays). In some embodiments, a Cryptic family protein 1B:ALK2 heteromultimer of the disclosure has a different TGF-beta ligand binding and/or inhibition profile (specificity) compared to a corresponding homomultimer (e.g., Cryptic family protein 1B and ALK2 homomultimers). In some embodiments, a Cryptic family protein 1B:ALK2 heteromultimer of the disclosure is a heterodimer.

[0036] In certain aspects, the disclosure relates to heteromultimers that comprise at least one Cryptic family protein 1B polypeptide, which includes fragments, functional variants, and modified forms thereof, and at least one ALK3 polypeptide, which includes fragments, functional variants, and modified forms thereof. In some embodiments, the Cryptic family protein 1B:ALK3 heteromultimer comprises a polypeptide that is at least 70%, 75%, 80%, 85%, 90%, 91%, 92%, 93%, 94%, 95%, 95%, 96%, 97%, 98%, 99%, or 100% identical to the amino acid sequence of any one of SEQ ID NOs: 533 or 534. In some embodiments, the Cryptic family protein 1B:ALK3 heteromultimer comprises a polypeptide that is at least 70%, 75%, 80%, 85%, 90%, 91%, 92%, 93%, 94%, 95%, 95%, 96%, 97%, 98%, 99%, or 100% identical to a polypeptide that begins at any one of amino acids of 26-30 of SEQ ID NO: 533 and ends at any one of amino acids 82-223 of SEQ ID NO: 533. In some embodiments, the Cryptic family protein 1B:ALK3 heteromultimer comprises a polypeptide that is at least 70%, 75%, 80%, 85%, 90%, 91%, 92%, 93%, 94%, 95%, 95%, 96%, 97%, 98%, 99%, or 100% identical to the amino acid sequence of any one of SEQ ID NOs: SEQ ID NO: 22 or 23. In some embodiments the Cryptic family protein 1B:ALK3 heteromultimer comprises a polypeptide that is at least 70%, 75%, 80%, 85%, 90%, 91%, 92%, 93%, 94%, 95%, 95%, 96%, 97%, 98%, 99%, or 100% identical to a polypeptide that begins at any one of amino acids of 24-61 of SEQ ID NO: 22 and ends at any one of amino acids 130-152 of SEQ ID NO: 22. In certain preferred embodiments, Cryptic family protein 1B:ALK3 heteromultimers are soluble. In some embodiments, a Cryptic family protein 1B:ALK3 heteromultimer of the disclosure binds to one or more TGF-beta superfamily ligands (e.g., binds to one or more TGF-beta superfamily ligands with a K_{D} of at least 1×10⁻⁷). In some embodiments, a Cryptic family protein 1B:ALK3 heteromultimer of the disclosure inhibits one or more TGF-beta superfamily ligands (e.g., inhibits Smad signaling). Heteromultimer-ligand binding and inhibition may be determined using a variety of assays including, for example, those described herein (e.g., in vitro binding and/or cell-based signaling assays). In some embodiments, a Cryptic family protein 1B:ALK3 heteromultimer of the disclosure has a different TGF-beta ligand binding and/or inhibition profile (specificity) compared to a corresponding homomultimer (e.g., Cryptic family protein 1B and ALK3 homomultimers). In some embodiments, a Cryptic family protein 1B:ALK3 heteromultimer of the disclosure is a heterodimer.

[0037] In certain aspects, the disclosure relates to heteromultimers that comprise at least one Cryptic family protein 1B polypeptide, which includes fragments, functional variants, and modified forms thereof, and at least one ALK4 polypeptide, which includes fragments, functional variants, and modified forms thereof. In some embodiments, the Cryptic family protein 1B:ALK4 heteromultimer comprises a polypeptide that is at least 70%, 75%, 80%, 85%, 90%, 91%, 92%, 93%, 94%, 95%, 95%, 96%, 97%, 98%, 99%, or 100% identical to the amino acid sequence of any one of SEQ ID NOs: 533 or 534. In some embodiments, the Cryptic family protein 1B:ALK4 heteromultimer comprises a polypeptide that is at least 70%, 75%, 80%, 85%, 90%, 91%, 92%, 93%, 94%, 95%, 95%, 96%, 97%, 98%, 99%, or 100% identical to a polypeptide that begins at any one of amino acids of 26-30 of SEQ ID NO: 533 and ends at any one of amino acids 82-223 of SEQ ID NO: 533. In some embodiments, the Cryptic family protein 1B:ALK4 heteromultimer comprises a polypeptide that is at least 70%, 75%, 80%, 85%, 90%, 91%, 92%, 93%, 94%, 95%, 95%, 96%, 97%, 98%, 99%, or 100% identical to the amino acid sequence of any one of SEQ ID NOs: SEQ ID NO: 26, 27, 83, or 84. In some embodiments the Cryptic family protein 1B:ALK4 heteromultimer comprises a polypeptide that is at least 70%, 75%, 80%, 85%, 90%, 91%, 92%, 93%, 94%, 95%, 95%, 96%, 97%, 98%, 99%, or 100% identical to a polypeptide that begins at any one of amino acids of 24-34 of SEQ ID NO: 26 and ends at any one of amino acids 101-126 of SEQ ID NO: 26. In some embodiments the Cryptic family protein 1B:ALK4 heteromultimer comprises a polypeptide that is at least 70%, 75%, 80%, 85%, 90%, 91%, 92%, 93%, 94%, 95%, 95%, 96%, 97%, 98%, 99%, or 100% identical to a polypeptide that begins at any one of amino acids of 24-34 of SEQ ID NO: 83 and ends at any one of amino acids 101-126 of SEQ ID NO: 83. In certain preferred embodiments, Cryptic family protein 1B:ALK4 heteromultimers are soluble. In some embodiments, a Cryptic family protein 1B:ALK4 heteromultimer of the disclosure binds to one or more TGF-beta superfamily ligands (e.g., binds to one or more TGF-beta superfamily ligands with a K_{D} of at least 1×10⁻⁷). In some embodiments, a Cryptic family protein 1B:ALK4 heteromultimer of the disclosure inhibits one or more TGF-beta superfamily ligands (e.g., inhibits Smad signaling). Heteromultimer-ligand binding and inhibition may be determined using a variety of assays including, for example, those described herein (e.g., in vitro binding and/or cell-based signaling assays). In some embodiments, a Cryptic family protein 1B:ALK4 heteromultimer of the disclosure has a different TGF-beta ligand binding and/or inhibition profile (specificity) compared to a corresponding homomultimer (e.g., Cryptic family protein 1B and ALK4 homomultimers). In some embodiments, a Cryptic family protein 1B:ALK4 heteromultimer of the disclosure is a heterodimer.

[0038] In certain aspects, the disclosure relates to heteromultimers that comprise at least one Cryptic family protein 1B polypeptide, which includes fragments, functional variants, and modified forms thereof, and at least one ALK5 polypeptide, which includes fragments, functional variants, and modified forms thereof. In some embodiments, the Cryptic family protein 1B:ALK5 heteromultimer comprises a polypeptide that is at least 70%, 75%, 80%, 85%, 90%, 91%, 92%, 93%, 94%, 95%, 95%, 96%, 97%, 98%, 99%, or 100% identical to the amino acid sequence of any one of SEQ ID NOs: 533 or 534. In some embodiments, the Cryptic family protein 1B:ALK5 heteromultimer comprises a polypeptide that is at least 70%, 75%, 80%, 85%, 90%, 91%, 92%, 93%, 94%, 95%, 95%, 96%, 97%, 98%, 99%, or 100% identical to a polypeptide that begins at any one of amino acids of 26-30 of SEQ ID NO: 533 and ends at any one of amino acids 82-223 of SEQ ID NO: 533. In some embodiments, the Cryptic family protein 1B:ALK5 heteromultimer comprises a polypeptide that is at least 70%, 75%, 80%, 85%, 90%, 91%, 92%, 93%, 94%, 95%, 95%, 96%, 97%, 98%, 99%, or 100% identical to the amino acid sequence of any one of SEQ ID NOs: SEQ ID NO: 30, 31, 87, or 88. In some embodiments the Cryptic family protein 1B:ALK5 heteromultimer comprises a polypeptide that is at least 70%, 75%, 80%, 85%, 90%, 91%, 92%, 93%, 94%, 95%, 95%, 96%, 97%, 98%, 99%, or 100% identical to a polypeptide that begins at any one of amino acids of 25-36 of SEQ ID NO: 30 and ends at any one of amino acids 101-126 of SEQ ID NO: 30. In some embodiments the Cryptic family protein 1B:ALK5 heteromultimer comprises a polypeptide that is at least 70%, 75%, 80%, 85%, 90%, 91%, 92%, 93%, 94%, 95%, 95%, 96%, 97%, 98%, 99%, or 100% identical to a polypeptide that begins at any one of amino acids of 25-36 of SEQ ID NO: 87 and ends at any one of amino acids 101-130 of SEQ ID NO: 87. In certain preferred embodiments, Cryptic family protein 1B:ALK5 heteromultimers are soluble. In some embodiments, a Cryptic family protein 1B:ALK5 heteromultimer of the disclosure binds to one or more TGF-beta superfamily ligands (e.g., binds to one or more TGF-beta superfamily ligands with a K_{D} of at least 1×10⁻⁷). In some embodiments, a Cryptic family protein 1B:ALK5 heteromultimer of the disclosure inhibits one or more TGF-beta superfamily ligands (e.g., inhibits Smad signaling). Heteromultimer-ligand binding and inhibition may be determined using a variety of assays including, for example, those described herein (e.g., in vitro binding and/or cell-based signaling assays). In some embodiments, a Cryptic family protein 1B:ALK5 heteromultimer of the disclosure has a different TGF-beta ligand binding and/or inhibition profile (specificity) compared to a corresponding homomultimer (e.g., Cryptic family protein 1B and ALK5 homomultimers). In some embodiments, a Cryptic family protein 1B:ALK5 heteromultimer of the disclosure is a heterodimer.

[0039] In certain aspects, the disclosure relates to heteromultimers that comprise at least one Cryptic family protein 1B polypeptide, which includes fragments, functional variants, and modified forms thereof, and at least one ALK6 polypeptide, which includes fragments, functional variants, and modified forms thereof. In some embodiments, the Cryptic family protein 1B:ALK6 heteromultimer comprises a polypeptide that is at least 70%, 75%, 80%, 85%, 90%, 91%, 92%, 93%, 94%, 95%, 95%, 96%, 97%, 98%, 99%, or 100% identical to the amino acid sequence of any one of SEQ ID NOs: 533 or 534. In some embodiments, the Cryptic family protein 1B:ALK6 heteromultimer comprises a polypeptide that is at least 70%, 75%, 80%, 85%, 90%, 91%, 92%, 93%, 94%, 95%, 95%, 96%, 97%, 98%, 99%, or 100% identical to a polypeptide that begins at any one of amino acids of 26-30 of SEQ ID NO: 533 and ends at any one of amino acids 82-223 of SEQ ID NO: 533. In some embodiments, the Cryptic family protein 1B:ALK6 heteromultimer comprises a polypeptide that is at least 70%, 75%, 80%, 85%, 90%, 91%, 92%, 93%, 94%, 95%, 95%, 96%, 97%, 98%, 99%, or 100% identical to the amino acid sequence of any one of SEQ ID NOs: SEQ ID NO: 34, 35, 91, or 92. In some embodiments the Cryptic family protein 1B:ALK6 heteromultimer comprises a polypeptide that is at least 70%, 75%, 80%, 85%, 90%, 91%, 92%, 93%, 94%, 95%, 95%, 96%, 97%, 98%, 99%, or 100% identical to a polypeptide that begins at any one of amino acids of 14-32 of SEQ ID NO: 34 and ends at any one of amino acids 102-126 of SEQ ID NO: 34. In some embodiments the Cryptic family protein 1B:ALK6 heteromultimer comprises a polypeptide that is at least 70%, 75%, 80%, 85%, 90%, 91%, 92%, 93%, 94%, 95%, 95%, 96%, 97%, 98%, 99%, or 100% identical to a polypeptide that begins at any one of amino acids of 26-62 of SEQ ID NO: 91 and ends at any one of amino acids 132-156 of SEQ ID NO: 91. In certain preferred embodiments, Cryptic family protein 1B:ALK6 heteromultimers are soluble. In some embodiments, a Cryptic family protein 1B:ALK6 heteromultimer of the disclosure binds to one or more TGF-beta superfamily ligands (e.g., binds to one or more TGF-beta superfamily ligands with a K_{D} of at least 1×10⁻⁷). In some embodiments, a Cryptic family protein 1B:ALK6 heteromultimer of the disclosure inhibits one or more TGF-beta superfamily ligands (e.g., inhibits Smad signaling). Heteromultimer-ligand binding and inhibition may be determined using a variety of assays including, for example, those described herein (e.g., in vitro binding and/or cell-based signaling assays). In some embodiments, a Cryptic family protein 1B:ALK6 heteromultimer of the disclosure has a different TGF-beta ligand binding and/or inhibition profile (specificity) compared to a corresponding homomultimer (e.g., Cryptic family protein 1B and ALK6 homomultimers). In some embodiments, a Cryptic family protein 1B:ALK6 heteromultimer of the disclosure is a heterodimer.

[0040] In certain aspects, the disclosure relates to heteromultimers that comprise at least one Cryptic family protein 1B polypeptide, which includes fragments, functional variants, and modified forms thereof, and at least one ALK7 polypeptide, which includes fragments, functional variants, and modified forms thereof. In some embodiments, the Cryptic family protein 1B:ALK7 heteromultimer comprises a polypeptide that is at least 70%, 75%, 80%, 85%, 90%, 91%, 92%, 93%, 94%, 95%, 95%, 96%, 97%, 98%, 99%, or 100% identical to the amino acid sequence of any one of SEQ ID NOs: 533 or 534. In some embodiments, the Cryptic family protein 1B:ALK7 heteromultimer comprises a polypeptide that is at least 70%, 75%, 80%, 85%, 90%, 91%, 92%, 93%, 94%, 95%, 95%, 96%, 97%, 98%, 99%, or 100% identical to a polypeptide that begins at any one of amino acids of 26-30 of SEQ ID NO: 533 and ends at any one of amino acids 82-223 of SEQ ID NO: 533. In some embodiments, the Cryptic family protein 1B:ALK7 heteromultimer comprises a polypeptide that is at least 70%, 75%, 80%, 85%, 90%, 91%, 92%, 93%, 94%, 95%, 95%, 96%, 97%, 98%, 99%, or 100% identical to the amino acid sequence of any one of SEQ ID NOs: SEQ ID NO: 38, 39, 301, 302, 305, 306, 309, 310, or 313. In some embodiments the Cryptic family protein 1B:ALK7 heteromultimer comprises a polypeptide that is at least 70%, 75%, 80%, 85%, 90%, 91%, 92%, 93%, 94%, 95%, 95%, 96%, 97%, 98%, 99%, or 100% identical to a polypeptide that begins at any one of amino acids of 21-28 of SEQ ID NO: 38 and ends at any one of amino acids 92-113 of SEQ ID NO: 38. In some embodiments the Cryptic family protein 1B:ALK7 heteromultimer comprises a polypeptide that is at least 70%, 75%, 80%, 85%, 90%, 91%, 92%, 93%, 94%, 95%, 95%, 96%, 97%, 98%, 99%, or 100% identical to a polypeptide that begins at any one of amino acids of 1-13 of SEQ ID NO: 301 and ends at any one of amino acids 42-63 of SEQ ID NO: 301. In some embodiments the Cryptic family protein 1B:ALK7 heteromultimer comprises a polypeptide that is at least 70%, 75%, 80%, 85%, 90%, 91%, 92%, 93%, 94%, 95%, 95%, 96%, 97%, 98%, 99%, or 100% identical to a polypeptide that begins at any one of amino acids of 21-28 of SEQ ID NO: 305 and ends at any one of amino acids 411-413 of SEQ ID NO: 305. In some embodiments the Cryptic family protein 1B:ALK7 heteromultimer comprises a polypeptide that is at least 70%, 75%, 80%, 85%, 90%, 91%, 92%, 93%, 94%, 95%, 95%, 96%, 97%, 98%, 99%, or 100% identical to a polypeptide that begins at any one of amino acids of 21-28 of SEQ ID NO: 309 and ends at any one of amino acids 334-336 of SEQ ID NO: 309. In certain preferred embodiments, Cryptic family protein 1B:ALK7 heteromultimers are soluble. In some embodiments, a Cryptic family protein 1B:ALK7 heteromultimer of the disclosure binds to one or more TGF-beta superfamily ligands (e.g., binds to one or more TGF-beta superfamily ligands with a K_{D} of at least 1×10⁻⁷). In some embodiments, a Cryptic family protein 1B:ALK7 heteromultimer of the disclosure inhibits one or more TGF-beta superfamily ligands (e.g., inhibits Smad signaling). Heteromultimer-ligand binding and inhibition may be determined using a variety of assays including, for example, those described herein (e.g., in vitro binding and/or cell-based signaling assays). In some embodiments, a Cryptic family protein 1B:ALK7 heteromultimer of the disclosure has a different TGF-beta ligand binding and/or inhibition profile (specificity) compared to a corresponding homomultimer (e.g., Cryptic family protein 1B and ALK7 homomultimers). In some embodiments, a Cryptic family protein 1B:ALK7 heteromultimer of the disclosure is a heterodimer.

[0041] In certain aspects, the disclosure relates to heteromultimers that comprise at least one Crim1 polypeptide, which includes fragments, functional variants, and modified forms thereof, and at least one ALK1 polypeptide, which includes fragments, functional variants, and modified forms thereof. In some embodiments, the Crim1:ALK1 heteromultimer comprises a polypeptide that is at least 70%, 75%, 80%, 85%, 90%, 91%, 92%, 93%, 94%, 95%, 95%, 96%, 97%, 98%, 99%, or 100% identical to the amino acid sequence of any one of SEQ ID NOs: 537 or 538. In some embodiments, the Crim1:ALK1 heteromultimer comprises a polypeptide that is at least 70%, 75%, 80%, 85%, 90%, 91%, 92%, 93%, 94%, 95%, 95%, 96%, 97%, 98%, 99%, or 100% identical to a polypeptide that begins at any one of amino acids of 35-37 of SEQ ID NO: 537 and ends at any one of amino acids 873-939 of SEQ ID NO: 537. In some embodiments, the Crim1:ALK1 heteromultimer comprises a polypeptide that is at least 70%, 75%, 80%, 85%, 90%, 91%, 92%, 93%, 94%, 95%, 95%, 96%, 97%, 98%, 99%, or 100% identical to the amino acid sequence of any one of SEQ ID NOs: 537 or 538. In some embodiments, the Crim1:ALK1 heteromultimer comprises a polypeptide that is at least 70%, 75%, 80%, 85%, 90%, 91%, 92%, 93%, 94%, 95%, 95%, 96%, 97%, 98%, 99%, or 100% identical to a polypeptide that begins at any one of amino acids of 35-37 of SEQ ID NO: 537 and ends at any one of amino acids 873-939 of SEQ ID NO: 537. In some embodiments, the Crim1:ALK1 heteromultimer comprises a polypeptide that is at least 70%, 75%, 80%, 85%, 90%, 91%, 92%, 93%, 94%, 95%, 95%, 96%, 97%, 98%, 99%, or 100% identical to the amino acid sequence of any one of SEQ ID NOs: 14 or 15. In some embodiments, the Crim1:ALK1 heteromultimer comprises a polypeptide that is at least 70%, 75%, 80%, 85%, 90%, 91%, 92%, 93%, 94%, 95%, 95%, 96%, 97%, 98%, 99%, or 100% identical to a polypeptide that begins at any one of amino acids of 22-34 of SEQ ID NO: 14 and ends at any one of amino acids 95-118 of SEQ ID NO: 14. In certain preferred embodiments, Crim1:ALK1 heteromultimers are soluble. In some embodiments, a Crim1:ALK1 heteromultimer of the disclosure binds to one or more TGF-beta superfamily ligands (e.g., binds to one or more TGF-beta superfamily ligands with a K_{D} of at least 1×10⁻⁷). In some embodiments, a Crim1:ALK1 heteromultimer of the disclosure inhibits one or more TGF-beta superfamily ligands (e.g., inhibits Smad signaling). Heteromultimer-ligand binding and inhibition may be determined using a variety of assays including, for example, those described herein (e.g., in vitro binding and/or cell-based signaling assays). In some embodiments, a Crim1:ALK1 heteromultimer of the disclosure has a different TGF-beta ligand binding and/or inhibition profile (specificity) compared to a corresponding homomultimer (e.g., Crim1 and ALK1 homomultimers). In some embodiments, a Crim1:ALK1 heteromultimer of the disclosure is a heterodimer.

[0042] In certain aspects, the disclosure relates to heteromultimers that comprise at least one Crim1 polypeptide, which includes fragments, functional variants, and modified forms thereof, and at least one ALK2 polypeptide, which includes fragments, functional variants, and modified forms thereof. In some embodiments, the Crim1:ALK2 heteromultimer comprises a polypeptide that is at least 70%, 75%, 80%, 85%, 90%, 91%, 92%, 93%, 94%, 95%, 95%, 96%, 97%, 98%, 99%, or 100% identical to the amino acid sequence of any one of SEQ ID NOs: 537 or 538. In some embodiments, the Crim1:ALK2 heteromultimer comprises a polypeptide that is at least 70%, 75%, 80%, 85%, 90%, 91%, 92%, 93%, 94%, 95%, 95%, 96%, 97%, 98%, 99%, or 100% identical to a polypeptide that begins at any one of amino acids of 35-37 of SEQ ID NO: 537 and ends at any one of amino acids 873-939 of SEQ ID NO: 537. In some embodiments, the Crim1:ALK2 heteromultimer comprises a polypeptide that is at least 70%, 75%, 80%, 85%, 90%, 91%, 92%, 93%, 94%, 95%, 95%, 96%, 97%, 98%, 99%, or 100% identical to the amino acid sequence of any one of SEQ ID NOs: SEQ ID NO: 18 or 19. In some embodiments the Crim1:ALK2 heteromultimer comprises a polypeptide that is at least 70%, 75%, 80%, 85%, 90%, 91%, 92%, 93%, 94%, 95%, 95%, 96%, 97%, 98%, 99%, or 100% identical to a polypeptide that begins at any one of amino acids of 21-35 of SEQ ID NO: 18 and ends at any one of amino acids 99-123 of SEQ ID NO: 18. In certain preferred embodiments, Crim1:ALK2 heteromultimers are soluble. In some embodiments, a Crim1:ALK2 heteromultimer of the disclosure binds to one or more TGF-beta superfamily ligands (e.g., binds to one or more TGF-beta superfamily ligands with a K_{D} of at least 1×10⁻⁷). In some embodiments, a Crim1:ALK2 heteromultimer of the disclosure inhibits one or more TGF-beta superfamily ligands (e.g., inhibits Smad signaling). Heteromultimer-ligand binding and inhibition may be determined using a variety of assays including, for example, those described herein (e.g., in vitro binding and/or cell-based signaling assays). In some embodiments, a Crim1:ALK2 heteromultimer of the disclosure has a different TGF-beta ligand binding and/or inhibition profile (specificity) compared to a corresponding homomultimer (e.g., Crim1 and ALK2 homomultimers). In some embodiments, a Crim1:ALK2 heteromultimer of the disclosure is a heterodimer.

[0043] In certain aspects, the disclosure relates to heteromultimers that comprise at least one Crim1 polypeptide, which includes fragments, functional variants, and modified forms thereof, and at least one ALK3 polypeptide, which includes fragments, functional variants, and modified forms thereof. In some embodiments, the Crim1:ALK3 heteromultimer comprises a polypeptide that is at least 70%, 75%, 80%, 85%, 90%, 91%, 92%, 93%, 94%, 95%, 95%, 96%, 97%, 98%, 99%, or 100% identical to the amino acid sequence of any one of SEQ ID NOs: 537 or 538. In some embodiments, the Crim1:ALK3 heteromultimer comprises a polypeptide that is at least 70%, 75%, 80%, 85%, 90%, 91%, 92%, 93%, 94%, 95%, 95%, 96%, 97%, 98%, 99%, or 100% identical to a polypeptide that begins at any one of amino acids of 35-37 of SEQ ID NO: 537 and ends at any one of amino acids 873-939 of SEQ ID NO: 537. In some embodiments, the Crim1:ALK3 heteromultimer comprises a polypeptide that is at least 70%, 75%, 80%, 85%, 90%, 91%, 92%, 93%, 94%, 95%, 95%, 96%, 97%, 98%, 99%, or 100% identical to the amino acid sequence of any one of SEQ ID NOs: SEQ ID NO: 22 or 23. In some embodiments the Crim1:ALK3 heteromultimer comprises a polypeptide that is at least 70%, 75%, 80%, 85%, 90%, 91%, 92%, 93%, 94%, 95%, 95%, 96%, 97%, 98%, 99%, or 100% identical to a polypeptide that begins at any one of amino acids of 24-61 of SEQ ID NO: 22 and ends at any one of amino acids 130-152 of SEQ ID NO: 22. In certain preferred embodiments, Crim1:ALK3 heteromultimers are soluble. In some embodiments, a Crim1:ALK3 heteromultimer of the disclosure binds to one or more TGF-beta superfamily ligands (e.g., binds to one or more TGF-beta superfamily ligands with a K_{D} of at least 1×10⁻⁷). In some embodiments, a Crim1:ALK3 heteromultimer of the disclosure inhibits one or more TGF-beta superfamily ligands (e.g., inhibits Smad signaling). Heteromultimer-ligand binding and inhibition may be determined using a variety of assays including, for example, those described herein (e.g., in vitro binding and/or cell-based signaling assays). In some embodiments, a Crim1:ALK3 heteromultimer of the disclosure has a different TGF-beta ligand binding and/or inhibition profile (specificity) compared to a corresponding homomultimer (e.g., Crim1 and ALK3 homomultimers). In some embodiments, a Crim1:ALK3 heteromultimer of the disclosure is a heterodimer.

[0044] In certain aspects, the disclosure relates to heteromultimers that comprise at least one Crim1 polypeptide, which includes fragments, functional variants, and modified forms thereof, and at least one ALK4 polypeptide, which includes fragments, functional variants, and modified forms thereof. In some embodiments, the Crim1:ALK4 heteromultimer comprises a polypeptide that is at least 70%, 75%, 80%, 85%, 90%, 91%, 92%, 93%, 94%, 95%, 95%, 96%, 97%, 98%, 99%, or 100% identical to the amino acid sequence of any one of SEQ ID NOs: 537 or 538. In some embodiments, the Crim1:ALK4 heteromultimer comprises a polypeptide that is at least 70%, 75%, 80%, 85%, 90%, 91%, 92%, 93%, 94%, 95%, 95%, 96%, 97%, 98%, 99%, or 100% identical to a polypeptide that begins at any one of amino acids of 35-37 of SEQ ID NO: 537 and ends at any one of amino acids 873-939 of SEQ ID NO: 537. In some embodiments, the Crim1:ALK4 heteromultimer comprises a polypeptide that is at least 70%, 75%, 80%, 85%, 90%, 91%, 92%, 93%, 94%, 95%, 95%, 96%, 97%, 98%, 99%, or 100% identical to the amino acid sequence of any one of SEQ ID NOs: SEQ ID NO: 26, 27, 83, or 84. In some embodiments the Crim1:ALK4 heteromultimer comprises a polypeptide that is at least 70%, 75%, 80%, 85%, 90%, 91%, 92%, 93%, 94%, 95%, 95%, 96%, 97%, 98%, 99%, or 100% identical to a polypeptide that begins at any one of amino acids of 24-34 of SEQ ID NO: 26 and ends at any one of amino acids 101-126 of SEQ ID NO: 26. In some embodiments the Crim1:ALK4 heteromultimer comprises a polypeptide that is at least 70%, 75%, 80%, 85%, 90%, 91%, 92%, 93%, 94%, 95%, 95%, 96%, 97%, 98%, 99%, or 100% identical to a polypeptide that begins at any one of amino acids of 24-34 of SEQ ID NO: 83 and ends at any one of amino acids 101-126 of SEQ ID NO: 83. In certain preferred embodiments, Crim1:ALK4 heteromultimers are soluble. In some embodiments, a Crim1:ALK4 heteromultimer of the disclosure binds to one or more TGF-beta superfamily ligands (e.g., binds to one or more TGF-beta superfamily ligands with a K_{D} of at least 1×10⁻⁷). In some embodiments, a Crim1:ALK4 heteromultimer of the disclosure inhibits one or more TGF-beta superfamily ligands (e.g., inhibits Smad signaling). Heteromultimer-ligand binding and inhibition may be determined using a variety of assays including, for example, those described herein (e.g., in vitro binding and/or cell-based signaling assays). In some embodiments, a Crim1:ALK4 heteromultimer of the disclosure has a different TGF-beta ligand binding and/or inhibition profile (specificity) compared to a corresponding homomultimer (e.g., Crim1 and ALK4 homomultimers). In some embodiments, a Crim1:ALK4 heteromultimer of the disclosure is a heterodimer.

[0045] In certain aspects, the disclosure relates to heteromultimers that comprise at least one Crim1 polypeptide, which includes fragments, functional variants, and modified forms thereof, and at least one ALK5 polypeptide, which includes fragments, functional variants, and modified forms thereof. In some embodiments, the Crim1:ALK5 heteromultimer comprises a polypeptide that is at least 70%, 75%, 80%, 85%, 90%, 91%, 92%, 93%, 94%, 95%, 95%, 96%, 97%, 98%, 99%, or 100% identical to the amino acid sequence of any one of SEQ ID NOs: 537 or 538. In some embodiments, the Crim1:ALK5 heteromultimer comprises a polypeptide that is at least 70%, 75%, 80%, 85%, 90%, 91%, 92%, 93%, 94%, 95%, 95%, 96%, 97%, 98%, 99%, or 100% identical to a polypeptide that begins at any one of amino acids of 35-37 of SEQ ID NO: 537 and ends at any one of amino acids 873-939 of SEQ ID NO: 537. In some embodiments, the Crim1:ALK5 heteromultimer comprises a polypeptide that is at least 70%, 75%, 80%, 85%, 90%, 91%, 92%, 93%, 94%, 95%, 95%, 96%, 97%, 98%, 99%, or 100% identical to the amino acid sequence of any one of SEQ ID NOs: SEQ ID NO: 30, 31, 87, or 88. In some embodiments the Crim1:ALK5 heteromultimer comprises a polypeptide that is at least 70%, 75%, 80%, 85%, 90%, 91%, 92%, 93%, 94%, 95%, 95%, 96%, 97%, 98%, 99%, or 100% identical to a polypeptide that begins at any one of amino acids of 25-36 of SEQ ID NO: 30 and ends at any one of amino acids 101-126 of SEQ ID NO: 30. In some embodiments the Crim1:ALK5 heteromultimer comprises a polypeptide that is at least 70%, 75%, 80%, 85%, 90%, 91%, 92%, 93%, 94%, 95%, 95%, 96%, 97%, 98%, 99%, or 100% identical to a polypeptide that begins at any one of amino acids of 25-36 of SEQ ID NO: 87 and ends at any one of amino acids 101-130 of SEQ ID NO: 87. In certain preferred embodiments, Crim1:ALK5 heteromultimers are soluble. In some embodiments, a Crim1:ALK5 heteromultimer of the disclosure binds to one or more TGF-beta superfamily ligands (e.g., binds to one or more TGF-beta superfamily ligands with a K_{D} of at least 1×10⁻⁷). In some embodiments, a Crim1:ALK5 heteromultimer of the disclosure inhibits one or more TGF-beta superfamily ligands (e.g., inhibits Smad signaling). Heteromultimer-ligand binding and inhibition may be determined using a variety of assays including, for example, those described herein (e.g., in vitro binding and/or cell-based signaling assays). In some embodiments, a Crim1:ALK5 heteromultimer of the disclosure has a different TGF-beta ligand binding and/or inhibition profile (specificity) compared to a corresponding homomultimer (e.g., Crim1 and ALK5 homomultimers). In some embodiments, a Crim1:ALK5 heteromultimer of the disclosure is a heterodimer.

[0046] In certain aspects, the disclosure relates to heteromultimers that comprise at least one Crim1 polypeptide, which includes fragments, functional variants, and modified forms thereof, and at least one ALK6 polypeptide, which includes fragments, functional variants, and modified forms thereof. In some embodiments, the Crim1:ALK6 heteromultimer comprises a polypeptide that is at least 70%, 75%, 80%, 85%, 90%, 91%, 92%, 93%, 94%, 95%, 95%, 96%, 97%, 98%, 99%, or 100% identical to the amino acid sequence of any one of SEQ ID NOs: 537 or 538. In some embodiments, the Crim1:ALK6 heteromultimer comprises a polypeptide that is at least 70%, 75%, 80%, 85%, 90%, 91%, 92%, 93%, 94%, 95%, 95%, 96%, 97%, 98%, 99%, or 100% identical to a polypeptide that begins at any one of amino acids of 35-37 of SEQ ID NO: 537 and ends at any one of amino acids 873-939 of SEQ ID NO: 537. In some embodiments, the Crim1:ALK6 heteromultimer comprises a polypeptide that is at least 70%, 75%, 80%, 85%, 90%, 91%, 92%, 93%, 94%, 95%, 95%, 96%, 97%, 98%, 99%, or 100% identical to the amino acid sequence of any one of SEQ ID NOs: SEQ ID NO: 34, 35, 91, or 92. In some embodiments the Crim1:ALK6 heteromultimer comprises a polypeptide that is at least 70%, 75%, 80%, 85%, 90%, 91%, 92%, 93%, 94%, 95%, 95%, 96%, 97%, 98%, 99%, or 100% identical to a polypeptide that begins at any one of amino acids of 14-32 of SEQ ID NO: 34 and ends at any one of amino acids 102-126 of SEQ ID NO: 34. In some embodiments the Crim1:ALK6 heteromultimer comprises a polypeptide that is at least 70%, 75%, 80%, 85%, 90%, 91%, 92%, 93%, 94%, 95%, 95%, 96%, 97%, 98%, 99%, or 100% identical to a polypeptide that begins at any one of amino acids of 26-62 of SEQ ID NO: 91 and ends at any one of amino acids 132-156 of SEQ ID NO: 91. In certain preferred embodiments, Crim1:ALK6 heteromultimers are soluble. In some embodiments, a Crim1:ALK6 heteromultimer of the disclosure binds to one or more TGF-beta superfamily ligands (e.g., binds to one or more TGF-beta superfamily ligands with a K_{D} of at least 1×10⁻⁷). In some embodiments, a Crim1:ALK6 heteromultimer of the disclosure inhibits one or more TGF-beta superfamily ligands (e.g., inhibits Smad signaling). Heteromultimer-ligand binding and inhibition may be determined using a variety of assays including, for example, those described herein (e.g., in vitro binding and/or cell-based signaling assays). In some embodiments, a Crim1:ALK6 heteromultimer of the disclosure has a different TGF-beta ligand binding and/or inhibition profile (specificity) compared to a corresponding homomultimer (e.g., Crim1 and ALK6 homomultimers). In some embodiments, a Crim1:ALK6 heteromultimer of the disclosure is a heterodimer.

[0047] In certain aspects, the disclosure relates to heteromultimers that comprise at least one Crim1 polypeptide, which includes fragments, functional variants, and modified forms thereof, and at least one ALK7 polypeptide, which includes fragments, functional variants, and modified forms thereof. In some embodiments, the Crim1:ALK7 heteromultimer comprises a polypeptide that is at least 70%, 75%, 80%, 85%, 90%, 91%, 92%, 93%, 94%, 95%, 95%, 96%, 97%, 98%, 99%, or 100% identical to the amino acid sequence of any one of SEQ ID NOs: 537 or 538. In some embodiments, the Crim1:ALK7 heteromultimer comprises a polypeptide that is at least 70%, 75%, 80%, 85%, 90%, 91%, 92%, 93%, 94%, 95%, 95%, 96%, 97%, 98%, 99%, or 100% identical to a polypeptide that begins at any one of amino acids of 35-37 of SEQ ID NO: 537 and ends at any one of amino acids 873-939 of SEQ ID NO: 537. In some embodiments, the Crim1:ALK7 heteromultimer comprises a polypeptide that is at least 70%, 75%, 80%, 85%, 90%, 91%, 92%, 93%, 94%, 95%, 95%, 96%, 97%, 98%, 99%, or 100% identical to the amino acid sequence of any one of SEQ ID NOs: SEQ ID NO: 38, 39, 301, 302, 305, 306, 309, 310, or 313. In some embodiments the Crim1:ALK7 heteromultimer comprises a polypeptide that is at least 70%, 75%, 80%, 85%, 90%, 91%, 92%, 93%, 94%, 95%, 95%, 96%, 97%, 98%, 99%, or 100% identical to a polypeptide that begins at any one of amino acids of 21-28 of SEQ ID NO: 38 and ends at any one of amino acids 92-113 of SEQ ID NO: 38. In some embodiments the Crim1:ALK7 heteromultimer comprises a polypeptide that is at least 70%, 75%, 80%, 85%, 90%, 91%, 92%, 93%, 94%, 95%, 95%, 96%, 97%, 98%, 99%, or 100% identical to a polypeptide that begins at any one of amino acids of 1-13 of SEQ ID NO: 301 and ends at any one of amino acids 42-63 of SEQ ID NO: 301. In some embodiments the Crim1:ALK7 heteromultimer comprises a polypeptide that is at least 70%, 75%, 80%, 85%, 90%, 91%, 92%, 93%, 94%, 95%, 95%, 96%, 97%, 98%, 99%, or 100% identical to a polypeptide that begins at any one of amino acids of 21-28 of SEQ ID NO: 305 and ends at any one of amino acids 411-413 of SEQ ID NO: 305. In some embodiments the Crim1:ALK7 heteromultimer comprises a polypeptide that is at least 70%, 75%, 80%, 85%, 90%, 91%, 92%, 93%, 94%, 95%, 95%, 96%, 97%, 98%, 99%, or 100% identical to a polypeptide that begins at any one of amino acids of 21-28 of SEQ ID NO: 309 and ends at any one of amino acids 334-336 of SEQ ID NO: 309. In certain preferred embodiments, Crim1:ALK7 heteromultimers are soluble. In some embodiments, a Crim1:ALK7 heteromultimer of the disclosure binds to one or more TGF-beta superfamily ligands (e.g., binds to one or more TGF-beta superfamily ligands with a K_{D} of at least 1×10⁻⁷). In some embodiments, a Crim1:ALK7 heteromultimer of the disclosure inhibits one or more TGF-beta superfamily ligands (e.g., inhibits Smad signaling). Heteromultimer-ligand binding and inhibition may be determined using a variety of assays including, for example, those described herein (e.g., in vitro binding and/or cell-based signaling assays). In some embodiments, a Crim1:ALK7 heteromultimer of the disclosure has a different TGF-beta ligand binding and/or inhibition profile (specificity) compared to a corresponding homomultimer (e.g., Crim1 and ALK7 homomultimers). In some embodiments, a Crim1:ALK7 heteromultimer of the disclosure is a heterodimer.

[0048] In certain aspects, the disclosure relates to heteromultimers that comprise at least one Crim2 polypeptide, which includes fragments, functional variants, and modified forms thereof, and at least one ALK1 polypeptide, which includes fragments, functional variants, and modified forms thereof. In some embodiments, the Crim2:ALK1 heteromultimer comprises a polypeptide that is at least 70%, 75%, 80%, 85%, 90%, 91%, 92%, 93%, 94%, 95%, 95%, 96%, 97%, 98%, 99%, or 100% identical to the amino acid sequence of any one of SEQ ID NOs: 541, 542, 545, or 546. In some embodiments, the Crim2:ALK1 heteromultimer comprises a polypeptide that is at least 70%, 75%, 80%, 85%, 90%, 91%, 92%, 93%, 94%, 95%, 95%, 96%, 97%, 98%, 99%, or 100% identical to a polypeptide that begins at any one of amino acids of 26-138 of SEQ ID NO: 541 and ends at any one of amino acids 1298-1503 of SEQ ID NO: 541. In some embodiments, the Crim2:ALK1 heteromultimer comprises a polypeptide that is at least 70%, 75%, 80%, 85%, 90%, 91%, 92%, 93%, 94%, 95%, 95%, 96%, 97%, 98%, 99%, or 100% identical to a polypeptide that begins at any one of amino acids of 24-138 of SEQ ID NO: 545 and ends at any one of amino acids 539-814 of SEQ ID NO: 545. In some embodiments, the Crim2:ALK1 heteromultimer comprises a polypeptide that is at least 70%, 75%, 80%, 85%, 90%, 91%, 92%, 93%, 94%, 95%, 95%, 96%, 97%, 98%, 99%, or 100% identical to the amino acid sequence of any one of SEQ ID NOs: 14 or 15. In some embodiments, the Crim2:ALK1 heteromultimer comprises a polypeptide that is at least 70%, 75%, 80%, 85%, 90%, 91%, 92%, 93%, 94%, 95%, 95%, 96%, 97%, 98%, 99%, or 100% identical to a polypeptide that begins at any one of amino acids of 22-34 of SEQ ID NO: 14 and ends at any one of amino acids 95-118 of SEQ ID NO: 14. In certain preferred embodiments, Crim2:ALK1 heteromultimers are soluble. In some embodiments, a Crim2:ALK1 heteromultimer of the disclosure binds to one or more TGF-beta superfamily ligands (e.g., binds to one or more TGF-beta superfamily ligands with a K_{D} of at least 1×10⁻⁷). In some embodiments, a Crim2:ALK1 heteromultimer of the disclosure inhibits one or more TGF-beta superfamily ligands (e.g., inhibits Smad signaling). Heteromultimer-ligand binding and inhibition may be determined using a variety of assays including, for example, those described herein (e.g., in vitro binding and/or cell-based signaling assays). In some embodiments, a Crim2:ALK1 heteromultimer of the disclosure has a different TGF-beta ligand binding and/or inhibition profile (specificity) compared to a corresponding homomultimer (e.g., Crim2 and ALK1 homomultimers). In some embodiments, a Crim2:ALK1 heteromultimer of the disclosure is a heterodimer.

[0049] In certain aspects, the disclosure relates to heteromultimers that comprise at least one Crim2 polypeptide, which includes fragments, functional variants, and modified forms thereof, and at least one ALK2 polypeptide, which includes fragments, functional variants, and modified forms thereof. In some embodiments, the Crim2:ALK2 heteromultimer comprises a polypeptide that is at least 70%, 75%, 80%, 85%, 90%, 91%, 92%, 93%, 94%, 95%, 95%, 96%, 97%, 98%, 99%, or 100% identical to the amino acid sequence of any one of SEQ ID NOs: 541, 542, 545, or 546. In some embodiments, the Crim2:ALK2 heteromultimer comprises a polypeptide that is at least 70%, 75%, 80%, 85%, 90%, 91%, 92%, 93%, 94%, 95%, 95%, 96%, 97%, 98%, 99%, or 100% identical to a polypeptide that begins at any one of amino acids of 26-138 of SEQ ID NO: 541 and ends at any one of amino acids 1298-1503 of SEQ ID NO: 541. In some embodiments, the Crim2:ALK2 heteromultimer comprises a polypeptide that is at least 70%, 75%, 80%, 85%, 90%, 91%, 92%, 93%, 94%, 95%, 95%, 96%, 97%, 98%, 99%, or 100% identical to a polypeptide that begins at any one of amino acids of 24-138 of SEQ ID NO: 545 and ends at any one of amino acids 539-814 of SEQ ID NO: 545. In some embodiments, the Crim2:ALK2 heteromultimer comprises a polypeptide that is at least 70%, 75%, 80%, 85%, 90%, 91%, 92%, 93%, 94%, 95%, 95%, 96%, 97%, 98%, 99%, or 100% identical to the amino acid sequence of any one of SEQ ID NOs: SEQ ID NO: 18 or 19. In some embodiments the Crim2:ALK2 heteromultimer comprises a polypeptide that is at least 70%, 75%, 80%, 85%, 90%, 91%, 92%, 93%, 94%, 95%, 95%, 96%, 97%, 98%, 99%, or 100% identical to a polypeptide that begins at any one of amino acids of 21-35 of SEQ ID NO: 18 and ends at any one of amino acids 99-123 of SEQ ID NO: 18. In certain preferred embodiments, Crim2:ALK2 heteromultimers are soluble. In some embodiments, a Crim2:ALK2 heteromultimer of the disclosure binds to one or more TGF-beta superfamily ligands (e.g., binds to one or more TGF-beta superfamily ligands with a K_{D} of at least 1×10⁻⁷). In some embodiments, a Crim2:ALK2 heteromultimer of the disclosure inhibits one or more TGF-beta superfamily ligands (e.g., inhibits Smad signaling). Heteromultimer-ligand binding and inhibition may be determined using a variety of assays including, for example, those described herein (e.g., in vitro binding and/or cell-based signaling assays). In some embodiments, a Crim2:ALK2 heteromultimer of the disclosure has a different TGF-beta ligand binding and/or inhibition profile (specificity) compared to a corresponding homomultimer (e.g., Crim2 and ALK2 homomultimers). In some embodiments, a Crim2:ALK2 heteromultimer of the disclosure is a heterodimer.

[0050] In certain aspects, the disclosure relates to heteromultimers that comprise at least one Crim2 polypeptide, which includes fragments, functional variants, and modified forms thereof, and at least one ALK3 polypeptide, which includes fragments, functional variants, and modified forms thereof. In some embodiments, the Crim2:ALK3 heteromultimer comprises a polypeptide that is at least 70%, 75%, 80%, 85%, 90%, 91%, 92%, 93%, 94%, 95%, 95%, 96%, 97%, 98%, 99%, or 100% identical to the amino acid sequence of any one of SEQ ID NOs: 541, 542, 545, or 546. In some embodiments, the Crim2:ALK3 heteromultimer comprises a polypeptide that is at least 70%, 75%, 80%, 85%, 90%, 91%, 92%, 93%, 94%, 95%, 95%, 96%, 97%, 98%, 99%, or 100% identical to a polypeptide that begins at any one of amino acids of 26-138 of SEQ ID NO: 541 and ends at any one of amino acids 1298-1503 of SEQ ID NO: 541. In some embodiments, the Crim2:ALK3 heteromultimer comprises a polypeptide that is at least 70%, 75%, 80%, 85%, 90%, 91%, 92%, 93%, 94%, 95%, 95%, 96%, 97%, 98%, 99%, or 100% identical to a polypeptide that begins at any one of amino acids of 24-138 of SEQ ID NO: 545 and ends at any one of amino acids 539-814 of SEQ ID NO: 545. In some embodiments, the Crim2:ALK1 heteromultimer comprises a polypeptide that is at least 70%, 75%, 80%, 85%, 90%, 91%, 92%, 93%, 94%, 95%, 95%, 96%, 97%, 98%, 99%, or 100% identical to the amino acid sequence of any one of SEQ ID NOs: 541, 542, 545, or 546. In some embodiments, the Crim2:ALK1 heteromultimer comprises a polypeptide that is at least 70%, 75%, 80%, 85%, 90%, 91%, 92%, 93%, 94%, 95%, 95%, 96%, 97%, 98%, 99%, or 100% identical to a polypeptide that begins at any one of amino acids of 26-138 of SEQ ID NO: 541 and ends at any one of amino acids 1298-1503 of SEQ ID NO: 541. In some embodiments, the Crim2:ALK1 heteromultimer comprises a polypeptide that is at least 70%, 75%, 80%, 85%, 90%, 91%, 92%, 93%, 94%, 95%, 95%, 96%, 97%, 98%, 99%, or 100% identical to a polypeptide that begins at any one of amino acids of 24-138 of SEQ ID NO: 545 and ends at any one of amino acids 539-814 of SEQ ID NO: 545. In certain preferred embodiments, Crim2:ALK3 heteromultimers are soluble. In some embodiments, a Crim2:ALK3 heteromultimer of the disclosure binds to one or more TGF-beta superfamily ligands (e.g., binds to one or more TGF-beta superfamily ligands with a K_{D} of at least 1×10⁻⁷). In some embodiments, a Crim2:ALK3 heteromultimer of the disclosure inhibits one or more TGF-beta superfamily ligands (e.g., inhibits Smad signaling). Heteromultimer-ligand binding and inhibition may be determined using a variety of assays including, for example, those described herein (e.g., in vitro binding and/or cell-based signaling assays). In some embodiments, a Crim2:ALK3 heteromultimer of the disclosure has a different TGF-beta ligand binding and/or inhibition profile (specificity) compared to a corresponding homomultimer (e.g., Crim2 and ALK3 homomultimers). In some embodiments, a Crim2:ALK3 heteromultimer of the disclosure is a heterodimer.

[0051] In certain aspects, the disclosure relates to heteromultimers that comprise at least one Crim2 polypeptide, which includes fragments, functional variants, and modified forms thereof, and at least one ALK4 polypeptide, which includes fragments, functional variants, and modified forms thereof. In some embodiments, the Crim2:ALK4 heteromultimer comprises a polypeptide that is at least 70%, 75%, 80%, 85%, 90%, 91%, 92%, 93%, 94%, 95%, 95%, 96%, 97%, 98%, 99%, or 100% identical to the amino acid sequence of any one of SEQ ID NOs: 541, 542, 545, or 546. In some embodiments, the Crim2:ALK4 heteromultimer comprises a polypeptide that is at least 70%, 75%, 80%, 85%, 90%, 91%, 92%, 93%, 94%, 95%, 95%, 96%, 97%, 98%, 99%, or 100% identical to a polypeptide that begins at any one of amino acids of 26-138 of SEQ ID NO: 541 and ends at any one of amino acids 1298-1503 of SEQ ID NO: 541. In some embodiments, the Crim2:ALK4 heteromultimer comprises a polypeptide that is at least 70%, 75%, 80%, 85%, 90%, 91%, 92%, 93%, 94%, 95%, 95%, 96%, 97%, 98%, 99%, or 100% identical to a polypeptide that begins at any one of amino acids of 24-138 of SEQ ID NO: 545 and ends at any one of amino acids 539-814 of SEQ ID NO: 545. In some embodiments, the Crim2:ALK4 heteromultimer comprises a polypeptide that is at least 70%, 75%, 80%, 85%, 90%, 91%, 92%, 93%, 94%, 95%, 95%, 96%, 97%, 98%, 99%, or 100% identical to the amino acid sequence of any one of SEQ ID NOs: SEQ ID NO: 26, 27, 83, or 84. In some embodiments the Crim2:ALK4 heteromultimer comprises a polypeptide that is at least 70%, 75%, 80%, 85%, 90%, 91%, 92%, 93%, 94%, 95%, 95%, 96%, 97%, 98%, 99%, or 100% identical to a polypeptide that begins at any one of amino acids of 24-34 of SEQ ID NO: 26 and ends at any one of amino acids 101-126 of SEQ ID NO: 26. In some embodiments the Crim2:ALK4 heteromultimer comprises a polypeptide that is at least 70%, 75%, 80%, 85%, 90%, 91%, 92%, 93%, 94%, 95%, 95%, 96%, 97%, 98%, 99%, or 100% identical to a polypeptide that begins at any one of amino acids of 24-34 of SEQ ID NO: 83 and ends at any one of amino acids 101-126 of SEQ ID NO: 83. In certain preferred embodiments, Crim2:ALK4 heteromultimers are soluble. In some embodiments, a Crim2:ALK4 heteromultimer of the disclosure binds to one or more TGF-beta superfamily ligands (e.g., binds to one or more TGF-beta superfamily ligands with a K_{D} of at least 1×10⁻⁷). In some embodiments, a Crim2:ALK4 heteromultimer of the disclosure inhibits one or more TGF-beta superfamily ligands (e.g., inhibits Smad signaling). Heteromultimer-ligand binding and inhibition may be determined using a variety of assays including, for example, those described herein (e.g., in vitro binding and/or cell-based signaling assays). In some embodiments, a Crim2:ALK4 heteromultimer of the disclosure has a different TGF-beta ligand binding and/or inhibition profile (specificity) compared to a corresponding homomultimer (e.g., Crim2 and ALK4 homomultimers). In some embodiments, a Crim2:ALK4 heteromultimer of the disclosure is a heterodimer.

[0052] In certain aspects, the disclosure relates to heteromultimers that comprise at least one Crim2 polypeptide, which includes fragments, functional variants, and modified forms thereof, and at least one ALK5 polypeptide, which includes fragments, functional variants, and modified forms thereof. In some embodiments, the Crim2:ALK5 heteromultimer comprises a polypeptide that is at least 70%, 75%, 80%, 85%, 90%, 91%, 92%, 93%, 94%, 95%, 95%, 96%, 97%, 98%, 99%, or 100% identical to the amino acid sequence of any one of SEQ ID NOs: 541, 542, 545, or 546. In some embodiments, the Crim2:ALK5 heteromultimer comprises a polypeptide that is at least 70%, 75%, 80%, 85%, 90%, 91%, 92%, 93%, 94%, 95%, 95%, 96%, 97%, 98%, 99%, or 100% identical to a polypeptide that begins at any one of amino acids of 26-138 of SEQ ID NO: 541 and ends at any one of amino acids 1298-1503 of SEQ ID NO: 541. In some embodiments, the Crim2:ALK5 heteromultimer comprises a polypeptide that is at least 70%, 75%, 80%, 85%, 90%, 91%, 92%, 93%, 94%, 95%, 95%, 96%, 97%, 98%, 99%, or 100% identical to a polypeptide that begins at any one of amino acids of 24-138 of SEQ ID NO: 545 and ends at any one of amino acids 539-814 of SEQ ID NO: 545. In some embodiments, the Crim2:ALK5 heteromultimer comprises a polypeptide that is at least 70%, 75%, 80%, 85%, 90%, 91%, 92%, 93%, 94%, 95%, 95%, 96%, 97%, 98%, 99%, or 100% identical to the amino acid sequence of any one of SEQ ID NOs: SEQ ID NO: 30, 31, 87, or 88. In some embodiments the Crim2:ALK5 heteromultimer comprises a polypeptide that is at least 70%, 75%, 80%, 85%, 90%, 91%, 92%, 93%, 94%, 95%, 95%, 96%, 97%, 98%, 99%, or 100% identical to a polypeptide that begins at any one of amino acids of 25-36 of SEQ ID NO: 30 and ends at any one of amino acids 101-126 of SEQ ID NO: 30. In some embodiments the Crim2:ALK5 heteromultimer comprises a polypeptide that is at least 70%, 75%, 80%, 85%, 90%, 91%, 92%, 93%, 94%, 95%, 95%, 96%, 97%, 98%, 99%, or 100% identical to a polypeptide that begins at any one of amino acids of 25-36 of SEQ ID NO: 87 and ends at any one of amino acids 101-130 of SEQ ID NO: 87. In certain preferred embodiments, Crim2:ALK5 heteromultimers are soluble. In some embodiments, a Crim2:ALK5 heteromultimer of the disclosure binds to one or more TGF-beta superfamily ligands (e.g., binds to one or more TGF-beta superfamily ligands with a K_{D} of at least 1×10⁻⁷). In some embodiments, a Crim2:ALK5 heteromultimer of the disclosure inhibits one or more TGF-beta superfamily ligands (e.g., inhibits Smad signaling). Heteromultimer-ligand binding and inhibition may be determined using a variety of assays including, for example, those described herein (e.g., in vitro binding and/or cell-based signaling assays). In some embodiments, a Crim2:ALK5 heteromultimer of the disclosure has a different TGF-beta ligand binding and/or inhibition profile (specificity) compared to a corresponding homomultimer (e.g., Crim2 and ALK5 homomultimers). In some embodiments, a Crim2:ALK5 heteromultimer of the disclosure is a heterodimer.

[0053] In certain aspects, the disclosure relates to heteromultimers that comprise at least one Crim2 polypeptide, which includes fragments, functional variants, and modified forms thereof, and at least one ALK6 polypeptide, which includes fragments, functional variants, and modified forms thereof. In some embodiments, the Crim2:ALK6 heteromultimer comprises a polypeptide that is at least 70%, 75%, 80%, 85%, 90%, 91%, 92%, 93%, 94%, 95%, 95%, 96%, 97%, 98%, 99%, or 100% identical to the amino acid sequence of any one of SEQ ID NOs: 541, 542, 545, or 546. In some embodiments, the Crim2:ALK6 heteromultimer comprises a polypeptide that is at least 70%, 75%, 80%, 85%, 90%, 91%, 92%, 93%, 94%, 95%, 95%, 96%, 97%, 98%, 99%, or 100% identical to a polypeptide that begins at any one of amino acids of 26-138 of SEQ ID NO: 541 and ends at any one of amino acids 1298-1503 of SEQ ID NO: 541. In some embodiments, the Crim2:ALK6 heteromultimer comprises a polypeptide that is at least 70%, 75%, 80%, 85%, 90%, 91%, 92%, 93%, 94%, 95%, 95%, 96%, 97%, 98%, 99%, or 100% identical to a polypeptide that begins at any one of amino acids of 24-138 of SEQ ID NO: 545 and ends at any one of amino acids 539-814 of SEQ ID NO: 545. In some embodiments, the Crim2:ALK6 heteromultimer comprises a polypeptide that is at least 70%, 75%, 80%, 85%, 90%, 91%, 92%, 93%, 94%, 95%, 95%, 96%, 97%, 98%, 99%, or 100% identical to the amino acid sequence of any one of SEQ ID NOs: SEQ ID NO: 34, 35, 91, or 92. In some embodiments the Crim2:ALK6 heteromultimer comprises a polypeptide that is at least 70%, 75%, 80%, 85%, 90%, 91%, 92%, 93%, 94%, 95%, 95%, 96%, 97%, 98%, 99%, or 100% identical to a polypeptide that begins at any one of amino acids of 14-32 of SEQ ID NO: 34 and ends at any one of amino acids 102-126 of SEQ ID NO: 34. In some embodiments the Crim2:ALK6 heteromultimer comprises a polypeptide that is at least 70%, 75%, 80%, 85%, 90%, 91%, 92%, 93%, 94%, 95%, 95%, 96%, 97%, 98%, 99%, or 100% identical to a polypeptide that begins at any one of amino acids of 26-62 of SEQ ID NO: 91 and ends at any one of amino acids 132-156 of SEQ ID NO: 91. In certain preferred embodiments, Crim2:ALK6 heteromultimers are soluble. In some embodiments, a Crim2:ALK6 heteromultimer of the disclosure binds to one or more TGF-beta superfamily ligands (e.g., binds to one or more TGF-beta superfamily ligands with a K_{D} of at least 1×10⁻⁷). In some embodiments, a Crim2:ALK6 heteromultimer of the disclosure inhibits one or more TGF-beta superfamily ligands (e.g., inhibits Smad signaling). Heteromultimer-ligand binding and inhibition may be determined using a variety of assays including, for example, those described herein (e.g., in vitro binding and/or cell-based signaling assays). In some embodiments, a Crim2:ALK6 heteromultimer of the disclosure has a different TGF-beta ligand binding and/or inhibition profile (specificity) compared to a corresponding homomultimer (e.g., Crim2 and ALK6 homomultimers). In some embodiments, a Crim2:ALK6 heteromultimer of the disclosure is a heterodimer.

[0054] In certain aspects, the disclosure relates to heteromultimers that comprise at least one Crim2 polypeptide, which includes fragments, functional variants, and modified forms thereof, and at least one ALK7 polypeptide, which includes fragments, functional variants, and modified forms thereof. In some embodiments, the Crim2:ALK7 heteromultimer comprises a polypeptide that is at least 70%, 75%, 80%, 85%, 90%, 91%, 92%, 93%, 94%, 95%, 95%, 96%, 97%, 98%, 99%, or 100% identical to the amino acid sequence of any one of SEQ ID NOs: 541, 542, 545, or 546. In some embodiments, the Crim2:ALK7 heteromultimer comprises a polypeptide that is at least 70%, 75%, 80%, 85%, 90%, 91%, 92%, 93%, 94%, 95%, 95%, 96%, 97%, 98%, 99%, or 100% identical to a polypeptide that begins at any one of amino acids of 26-138 of SEQ ID NO: 541 and ends at any one of amino acids 1298-1503 of SEQ ID NO: 541. In some embodiments, the Crim2:ALK7 heteromultimer comprises a polypeptide that is at least 70%, 75%, 80%, 85%, 90%, 91%, 92%, 93%, 94%, 95%, 95%, 96%, 97%, 98%, 99%, or 100% identical to a polypeptide that begins at any one of amino acids of 24-138 of SEQ ID NO: 545 and ends at any one of amino acids 539-814 of SEQ ID NO: 545. In some embodiments, the Crim2:ALK7 heteromultimer comprises a polypeptide that is at least 70%, 75%, 80%, 85%, 90%, 91%, 92%, 93%, 94%, 95%, 95%, 96%, 97%, 98%, 99%, or 100% identical to the amino acid sequence of any one of SEQ ID NOs: SEQ ID NO: 38, 39, 301, 302, 305, 306, 309, 310, or 313. In some embodiments the Crim2:ALK7 heteromultimer comprises a polypeptide that is at least 70%, 75%, 80%, 85%, 90%, 91%, 92%, 93%, 94%, 95%, 95%, 96%, 97%, 98%, 99%, or 100% identical to a polypeptide that begins at any one of amino acids of 21-28 of SEQ ID NO: 38 and ends at any one of amino acids 92-113 of SEQ ID NO: 38. In some embodiments the Crim2:ALK7 heteromultimer comprises a polypeptide that is at least 70%, 75%, 80%, 85%, 90%, 91%, 92%, 93%, 94%, 95%, 95%, 96%, 97%, 98%, 99%, or 100% identical to a polypeptide that begins at any one of amino acids of 1-13 of SEQ ID NO: 301 and ends at any one of amino acids 42-63 of SEQ ID NO: 301. In some embodiments the Crim2:ALK7 heteromultimer comprises a polypeptide that is at least 70%, 75%, 80%, 85%, 90%, 91%, 92%, 93%, 94%, 95%, 95%, 96%, 97%, 98%, 99%, or 100% identical to a polypeptide that begins at any one of amino acids of 21-28 of SEQ ID NO: 305 and ends at any one of amino acids 411-413 of SEQ ID NO: 305. In some embodiments the Crim2:ALK7 heteromultimer comprises a polypeptide that is at least 70%, 75%, 80%, 85%, 90%, 91%, 92%, 93%, 94%, 95%, 95%, 96%, 97%, 98%, 99%, or 100% identical to a polypeptide that begins at any one of amino acids of 21-28 of SEQ ID NO: 309 and ends at any one of amino acids 334-336 of SEQ ID NO: 309. In certain preferred embodiments, Crim2:ALK7 heteromultimers are soluble. In some embodiments, a Crim2:ALK7 heteromultimer of the disclosure binds to one or more TGF-beta superfamily ligands (e.g., binds to one or more TGF-beta superfamily ligands with a K_{D} of at least 1×10⁻⁷). In some embodiments, a Crim2:ALK7 heteromultimer of the disclosure inhibits one or more TGF-beta superfamily ligands (e.g., inhibits Smad signaling). Heteromultimer-ligand binding and inhibition may be determined using a variety of assays including, for example, those described herein (e.g., in vitro binding and/or cell-based signaling assays). In some embodiments, a Crim2:ALK7 heteromultimer of the disclosure has a different TGF-beta ligand binding and/or inhibition profile (specificity) compared to a corresponding homomultimer (e.g., Crim2 and ALK7 homomultimers). In some embodiments, a Crim2:ALK7 heteromultimer of the disclosure is a heterodimer.

[0055] In certain aspects, the disclosure relates to heteromultimers that comprise at least one BAMBI polypeptide, which includes fragments, functional variants, and modified forms thereof, and at least one ALK1 polypeptide, which includes fragments, functional variants, and modified forms thereof. In some embodiments, the BAMBI:ALK1 heteromultimer comprises a polypeptide that is at least 70%, 75%, 80%, 85%, 90%, 91%, 92%, 93%, 94%, 95%, 95%, 96%, 97%, 98%, 99%, or 100% identical to the amino acid sequence of any one of SEQ ID NOs: 549 or 550. In some embodiments, the BAMBI:ALK1 heteromultimer comprises a polypeptide that is at least 70%, 75%, 80%, 85%, 90%, 91%, 92%, 93%, 94%, 95%, 95%, 96%, 97%, 98%, 99%, or 100% identical to a polypeptide that begins at any one of amino acids of 21-30 of SEQ ID NO: 549 and ends at any one of amino acids 104-152 of SEQ ID NO: 549. In some embodiments, the BAMBI:ALK1 heteromultimer comprises a polypeptide that is at least 70%, 75%, 80%, 85%, 90%, 91%, 92%, 93%, 94%, 95%, 95%, 96%, 97%, 98%, 99%, or 100% identical to the amino acid sequence of any one of SEQ ID NOs: 14 or 15. In some embodiments, the BAMBI:ALK1 heteromultimer comprises a polypeptide that is at least 70%, 75%, 80%, 85%, 90%, 91%, 92%, 93%, 94%, 95%, 95%, 96%, 97%, 98%, 99%, or 100% identical to a polypeptide that begins at any one of amino acids of 22-34 of SEQ ID NO: 14 and ends at any one of amino acids 95-118 of SEQ ID NO: 14. In certain preferred embodiments, BAMBI:ALK1 heteromultimers are soluble. In some embodiments, a BAMBI:ALK1 heteromultimer of the disclosure binds to one or more TGF-beta superfamily ligands (e.g., binds to one or more TGF-beta superfamily ligands with a K_{D} of at least 1×10⁻⁷). In some embodiments, a BAMBI:ALK1 heteromultimer of the disclosure inhibits one or more TGF-beta superfamily ligands (e.g., inhibits Smad signaling). Heteromultimer-ligand binding and inhibition may be determined using a variety of assays including, for example, those described herein (e.g., in vitro binding and/or cell-based signaling assays). In some embodiments, a BAMBI:ALK1 heteromultimer of the disclosure has a different TGF-beta ligand binding and/or inhibition profile (specificity) compared to a corresponding homomultimer (e.g., BAMBI and ALK1 homomultimers). In some embodiments, a BAMBI:ALK1 heteromultimer of the disclosure is a heterodimer.

[0056] In certain aspects, the disclosure relates to heteromultimers that comprise at least one BAMBI polypeptide, which includes fragments, functional variants, and modified forms thereof, and at least one ALK2 polypeptide, which includes fragments, functional variants, and modified forms thereof. In some embodiments, the BAMBI:ALK2 heteromultimer comprises a polypeptide that is at least 70%, 75%, 80%, 85%, 90%, 91%, 92%, 93%, 94%, 95%, 95%, 96%, 97%, 98%, 99%, or 100% identical to the amino acid sequence of any one of SEQ ID NOs: 549 or 550. In some embodiments, the BAMBI:ALK2 heteromultimer comprises a polypeptide that is at least 70%, 75%, 80%, 85%, 90%, 91%, 92%, 93%, 94%, 95%, 95%, 96%, 97%, 98%, 99%, or 100% identical to a polypeptide that begins at any one of amino acids of 21-30 of SEQ ID NO: 549 and ends at any one of amino acids 104-152 of SEQ ID NO: 549. In some embodiments, the BAMBI:ALK2 heteromultimer comprises a polypeptide that is at least 70%, 75%, 80%, 85%, 90%, 91%, 92%, 93%, 94%, 95%, 95%, 96%, 97%, 98%, 99%, or 100% identical to the amino acid sequence of any one of SEQ ID NOs: SEQ ID NO: 18 or 19. In some embodiments the BAMBI:ALK2 heteromultimer comprises a polypeptide that is at least 70%, 75%, 80%, 85%, 90%, 91%, 92%, 93%, 94%, 95%, 95%, 96%, 97%, 98%, 99%, or 100% identical to a polypeptide that begins at any one of amino acids of 21-35 of SEQ ID NO: 18 and ends at any one of amino acids 99-123 of SEQ ID NO: 18. In certain preferred embodiments, BAMBI:ALK2 heteromultimers are soluble. In some embodiments, a BAMBI:ALK2 heteromultimer of the disclosure binds to one or more TGF-beta superfamily ligands (e.g., binds to one or more TGF-beta superfamily ligands with a K_{D} of at least 1×10⁻⁷). In some embodiments, a BAMBI:ALK2 heteromultimer of the disclosure inhibits one or more TGF-beta superfamily ligands (e.g., inhibits Smad signaling). Heteromultimer-ligand binding and inhibition may be determined using a variety of assays including, for example, those described herein (e.g., in vitro binding and/or cell-based signaling assays). In some embodiments, a BAMBI:ALK2 heteromultimer of the disclosure has a different TGF-beta ligand binding and/or inhibition profile (specificity) compared to a corresponding homomultimer (e.g., BAMBI and ALK2 homomultimers). In some embodiments, a BAMBI:ALK2 heteromultimer of the disclosure is a heterodimer.

[0057] In certain aspects, the disclosure relates to heteromultimers that comprise at least one BAMBI polypeptide, which includes fragments, functional variants, and modified forms thereof, and at least one ALK3 polypeptide, which includes fragments, functional variants, and modified forms thereof. In some embodiments, the BAMBI:ALK3 heteromultimer comprises a polypeptide that is at least 70%, 75%, 80%, 85%, 90%, 91%, 92%, 93%, 94%, 95%, 95%, 96%, 97%, 98%, 99%, or 100% identical to the amino acid sequence of any one of SEQ ID NOs: 549 or 550. In some embodiments, the BAMBI:ALK3 heteromultimer comprises a polypeptide that is at least 70%, 75%, 80%, 85%, 90%, 91%, 92%, 93%, 94%, 95%, 95%, 96%, 97%, 98%, 99%, or 100% identical to a polypeptide that begins at any one of amino acids of 21-30 of SEQ ID NO: 549 and ends at any one of amino acids 104-152 of SEQ ID NO: 549. In some embodiments, the BAMBI:ALK3 heteromultimer comprises a polypeptide that is at least 70%, 75%, 80%, 85%, 90%, 91%, 92%, 93%, 94%, 95%, 95%, 96%, 97%, 98%, 99%, or 100% identical to the amino acid sequence of any one of SEQ ID NOs: SEQ ID NO: 22 or 23. In some embodiments the BAMBI:ALK3 heteromultimer comprises a polypeptide that is at least 70%, 75%, 80%, 85%, 90%, 91%, 92%, 93%, 94%, 95%, 95%, 96%, 97%, 98%, 99%, or 100% identical to a polypeptide that begins at any one of amino acids of 24-61 of SEQ ID NO: 22 and ends at any one of amino acids 130-152 of SEQ ID NO: 22. In certain preferred embodiments, BAMBI:ALK3 heteromultimers are soluble. In some embodiments, a BAMBI:ALK3 heteromultimer of the disclosure binds to one or more TGF-beta superfamily ligands (e.g., binds to one or more TGF-beta superfamily ligands with a K_{D} of at least 1×10⁻⁷). In some embodiments, a BAMBI:ALK3 heteromultimer of the disclosure inhibits one or more TGF-beta superfamily ligands (e.g., inhibits Smad signaling). Heteromultimer-ligand binding and inhibition may be determined using a variety of assays including, for example, those described herein (e.g., in vitro binding and/or cell-based signaling assays). In some embodiments, a BAMBI:ALK3 heteromultimer of the disclosure has a different TGF-beta ligand binding and/or inhibition profile (specificity) compared to a corresponding homomultimer (e.g., BAMBI and ALK3 homomultimers). In some embodiments, a BAMBI:ALK3 heteromultimer of the disclosure is a heterodimer.

[0058] In certain aspects, the disclosure relates to heteromultimers that comprise at least one BAMBI polypeptide, which includes fragments, functional variants, and modified forms thereof, and at least one ALK4 polypeptide, which includes fragments, functional variants, and modified forms thereof. In some embodiments, the BAMBI:ALK4 heteromultimer comprises a polypeptide that is at least 70%, 75%, 80%, 85%, 90%, 91%, 92%, 93%, 94%, 95%, 95%, 96%, 97%, 98%, 99%, or 100% identical to the amino acid sequence of any one of SEQ ID NOs: 549 or 550. In some embodiments, the BAMBI:ALK4 heteromultimer comprises a polypeptide that is at least 70%, 75%, 80%, 85%, 90%, 91%, 92%, 93%, 94%, 95%, 95%, 96%, 97%, 98%, 99%, or 100% identical to a polypeptide that begins at any one of amino acids of 21-30 of SEQ ID NO: 549 and ends at any one of amino acids 104-152 of SEQ ID NO: 549. In some embodiments, the BAMBI:ALK4 heteromultimer comprises a polypeptide that is at least 70%, 75%, 80%, 85%, 90%, 91%, 92%, 93%, 94%, 95%, 95%, 96%, 97%, 98%, 99%, or 100% identical to the amino acid sequence of any one of SEQ ID NOs: SEQ ID NO: 26, 27, 83, or 84. In some embodiments the BAMBI:ALK4 heteromultimer comprises a polypeptide that is at least 70%, 75%, 80%, 85%, 90%, 91%, 92%, 93%, 94%, 95%, 95%, 96%, 97%, 98%, 99%, or 100% identical to a polypeptide that begins at any one of amino acids of 24-34 of SEQ ID NO: 26 and ends at any one of amino acids 101-126 of SEQ ID NO: 26. In some embodiments the BAMBI:ALK4 heteromultimer comprises a polypeptide that is at least 70%, 75%, 80%, 85%, 90%, 91%, 92%, 93%, 94%, 95%, 95%, 96%, 97%, 98%, 99%, or 100% identical to a polypeptide that begins at any one of amino acids of 24-34 of SEQ ID NO: 83 and ends at any one of amino acids 101-126 of SEQ ID NO: 83. In certain preferred embodiments, BAMBI:ALK4 heteromultimers are soluble. In some embodiments, a BAMBI:ALK4 heteromultimer of the disclosure binds to one or more TGF-beta superfamily ligands (e.g., binds to one or more TGF-beta superfamily ligands with a K_{D} of at least 1×10⁻⁷). In some embodiments, a BAMBI:ALK4 heteromultimer of the disclosure inhibits one or more TGF-beta superfamily ligands (e.g., inhibits Smad signaling). Heteromultimer-ligand binding and inhibition may be determined using a variety of assays including, for example, those described herein (e.g., in vitro binding and/or cell-based signaling assays). In some embodiments, a BAMBI:ALK4 heteromultimer of the disclosure has a different TGF-beta ligand binding and/or inhibition profile (specificity) compared to a corresponding homomultimer (e.g., BAMBI and ALK4 homomultimers). In some embodiments, a BAMBI:ALK4 heteromultimer of the disclosure is a heterodimer.

[0059] In certain aspects, the disclosure relates to heteromultimers that comprise at least one BAMBI polypeptide, which includes fragments, functional variants, and modified forms thereof, and at least one ALK5 polypeptide, which includes fragments, functional variants, and modified forms thereof. In some embodiments, the BAMBI:ALK5 heteromultimer comprises a polypeptide that is at least 70%, 75%, 80%, 85%, 90%, 91%, 92%, 93%, 94%, 95%, 95%, 96%, 97%, 98%, 99%, or 100% identical to the amino acid sequence of any one of SEQ ID NOs: 549 or 550. In some embodiments, the BAMBI:ALK5 heteromultimer comprises a polypeptide that is at least 70%, 75%, 80%, 85%, 90%, 91%, 92%, 93%, 94%, 95%, 95%, 96%, 97%, 98%, 99%, or 100% identical to a polypeptide that begins at any one of amino acids of 21-30 of SEQ ID NO: 549 and ends at any one of amino acids 104-152 of SEQ ID NO: 549. In some embodiments, the BAMBI:ALK5 heteromultimer comprises a polypeptide that is at least 70%, 75%, 80%, 85%, 90%, 91%, 92%, 93%, 94%, 95%, 95%, 96%, 97%, 98%, 99%, or 100% identical to the amino acid sequence of any one of SEQ ID NOs: SEQ ID NO: 30, 31, 87, or 88. In some embodiments the BAMBI:ALK5 heteromultimer comprises a polypeptide that is at least 70%, 75%, 80%, 85%, 90%, 91%, 92%, 93%, 94%, 95%, 95%, 96%, 97%, 98%, 99%, or 100% identical to a polypeptide that begins at any one of amino acids of 25-36 of SEQ ID NO: 30 and ends at any one of amino acids 101-126 of SEQ ID NO: 30. In some embodiments the BAMBI:ALK5 heteromultimer comprises a polypeptide that is at least 70%, 75%, 80%, 85%, 90%, 91%, 92%, 93%, 94%, 95%, 95%, 96%, 97%, 98%, 99%, or 100% identical to a polypeptide that begins at any one of amino acids of 25-36 of SEQ ID NO: 87 and ends at any one of amino acids 101-130 of SEQ ID NO: 87. In certain preferred embodiments, BAMBI:ALK5 heteromultimers are soluble. In some embodiments, a BAMBI:ALK5 heteromultimer of the disclosure binds to one or more TGF-beta superfamily ligands (e.g., binds to one or more TGF-beta superfamily ligands with a K_{D} of at least 1×10⁻⁷). In some embodiments, a BAMBI:ALK5 heteromultimer of the disclosure inhibits one or more TGF-beta superfamily ligands (e.g., inhibits Smad signaling). Heteromultimer-ligand binding and inhibition may be determined using a variety of assays including, for example, those described herein (e.g., in vitro binding and/or cell-based signaling assays). In some embodiments, a BAMBI:ALK5 heteromultimer of the disclosure has a different TGF-beta ligand binding and/or inhibition profile (specificity) compared to a corresponding homomultimer (e.g., BAMBI and ALK5 homomultimers). In some embodiments, a BAMBI:ALK5 heteromultimer of the disclosure is a heterodimer.

[0060] In certain aspects, the disclosure relates to heteromultimers that comprise at least one BAMBI polypeptide, which includes fragments, functional variants, and modified forms thereof, and at least one ALK6 polypeptide, which includes fragments, functional variants, and modified forms thereof. In some embodiments, the BAMBI:ALK6 heteromultimer comprises a polypeptide that is at least 70%, 75%, 80%, 85%, 90%, 91%, 92%, 93%, 94%, 95%, 95%, 96%, 97%, 98%, 99%, or 100% identical to the amino acid sequence of any one of SEQ ID NOs: 549 or 550. In some embodiments, the BAMBI:ALK6 heteromultimer comprises a polypeptide that is at least 70%, 75%, 80%, 85%, 90%, 91%, 92%, 93%, 94%, 95%, 95%, 96%, 97%, 98%, 99%, or 100% identical to a polypeptide that begins at any one of amino acids of 21-30 of SEQ ID NO: 549 and ends at any one of amino acids 104-152 of SEQ ID NO: 549. In some embodiments, the BAMBI:ALK6 heteromultimer comprises a polypeptide that is at least 70%, 75%, 80%, 85%, 90%, 91%, 92%, 93%, 94%, 95%, 95%, 96%, 97%, 98%, 99%, or 100% identical to the amino acid sequence of any one of SEQ ID NOs: SEQ ID NO: 34, 35, 91, or 92. In some embodiments the BAMBI:ALK6 heteromultimer comprises a polypeptide that is at least 70%, 75%, 80%, 85%, 90%, 91%, 92%, 93%, 94%, 95%, 95%, 96%, 97%, 98%, 99%, or 100% identical to a polypeptide that begins at any one of amino acids of 14-32 of SEQ ID NO: 34 and ends at any one of amino acids 102-126 of SEQ ID NO: 34. In some embodiments the BAMBI:ALK6 heteromultimer comprises a polypeptide that is at least 70%, 75%, 80%, 85%, 90%, 91%, 92%, 93%, 94%, 95%, 95%, 96%, 97%, 98%, 99%, or 100% identical to a polypeptide that begins at any one of amino acids of 26-62 of SEQ ID NO: 91 and ends at any one of amino acids 132-156 of SEQ ID NO: 91. In certain preferred embodiments, BAMBI:ALK6 heteromultimers are soluble. In some embodiments, a BAMBI:ALK6 heteromultimer of the disclosure binds to one or more TGF-beta superfamily ligands (e.g., binds to one or more TGF-beta superfamily ligands with a K_{D} of at least 1×10⁻⁷). In some embodiments, a BAMBI:ALK6 heteromultimer of the disclosure inhibits one or more TGF-beta superfamily ligands (e.g., inhibits Smad signaling). Heteromultimer-ligand binding and inhibition may be determined using a variety of assays including, for example, those described herein (e.g., in vitro binding and/or cell-based signaling assays). In some embodiments, a BAMBI:ALK6 heteromultimer of the disclosure has a different TGF-beta ligand binding and/or inhibition profile (specificity) compared to a corresponding homomultimer (e.g., BAMBI and ALK6 homomultimers). In some embodiments, a BAMBI:ALK6 heteromultimer of the disclosure is a heterodimer.

[0061] In certain aspects, the disclosure relates to heteromultimers that comprise at least one BAMBI polypeptide, which includes fragments, functional variants, and modified forms thereof, and at least one ALK7 polypeptide, which includes fragments, functional variants, and modified forms thereof. In some embodiments, the BAMBI:ALK7 heteromultimer comprises a polypeptide that is at least 70%, 75%, 80%, 85%, 90%, 91%, 92%, 93%, 94%, 95%, 95%, 96%, 97%, 98%, 99%, or 100% identical to the amino acid sequence of any one of SEQ ID NOs: 549 or 550. In some embodiments, the BAMBI:ALK7 heteromultimer comprises a polypeptide that is at least 70%, 75%, 80%, 85%, 90%, 91%, 92%, 93%, 94%, 95%, 95%, 96%, 97%, 98%, 99%, or 100% identical to a polypeptide that begins at any one of amino acids of 21-30 of SEQ ID NO: 549 and ends at any one of amino acids 104-152 of SEQ ID NO: 549. In some embodiments, the BAMBI:ALK7 heteromultimer comprises a polypeptide that is at least 70%, 75%, 80%, 85%, 90%, 91%, 92%, 93%, 94%, 95%, 95%, 96%, 97%, 98%, 99%, or 100% identical to the amino acid sequence of any one of SEQ ID NOs: SEQ ID NO: 38, 39, 301, 302, 305, 306, 309, 310, or 313. In some embodiments the BAMBI:ALK7 heteromultimer comprises a polypeptide that is at least 70%, 75%, 80%, 85%, 90%, 91%, 92%, 93%, 94%, 95%, 95%, 96%, 97%, 98%, 99%, or 100% identical to a polypeptide that begins at any one of amino acids of 21-28 of SEQ ID NO: 38 and ends at any one of amino acids 92-113 of SEQ ID NO: 38. In some embodiments the BAMBI:ALK7 heteromultimer comprises a polypeptide that is at least 70%, 75%, 80%, 85%, 90%, 91%, 92%, 93%, 94%, 95%, 95%, 96%, 97%, 98%, 99%, or 100% identical to a polypeptide that begins at any one of amino acids of 1-13 of SEQ ID NO: 301 and ends at any one of amino acids 42-63 of SEQ ID NO: 301. In some embodiments the BAMBI:ALK7 heteromultimer comprises a polypeptide that is at least 70%, 75%, 80%, 85%, 90%, 91%, 92%, 93%, 94%, 95%, 95%, 96%, 97%, 98%, 99%, or 100% identical to a polypeptide that begins at any one of amino acids of 21-28 of SEQ ID NO: 305 and ends at any one of amino acids 411-413 of SEQ ID NO: 305. In some embodiments the BAMBI:ALK7 heteromultimer comprises a polypeptide that is at least 70%, 75%, 80%, 85%, 90%, 91%, 92%, 93%, 94%, 95%, 95%, 96%, 97%, 98%, 99%, or 100% identical to a polypeptide that begins at any one of amino acids of 21-28 of SEQ ID NO: 309 and ends at any one of amino acids 334-336 of SEQ ID NO: 309. In certain preferred embodiments, BAMBI:ALK7 heteromultimers are soluble. In some embodiments, a BAMBI:ALK7 heteromultimer of the disclosure binds to one or more TGF-beta superfamily ligands (e.g., binds to one or more TGF-beta superfamily ligands with a K_{D} of at least 1×10⁻⁷). In some embodiments, a BAMBI:ALK7 heteromultimer of the disclosure inhibits one or more TGF-beta superfamily ligands (e.g., inhibits Smad signaling). Heteromultimer-ligand binding and inhibition may be determined using a variety of assays including, for example, those described herein (e.g., in vitro binding and/or cell-based signaling assays). In some embodiments, a BAMBI:ALK7 heteromultimer of the disclosure has a different TGF-beta ligand binding and/or inhibition profile (specificity) compared to a corresponding homomultimer (e.g., BAMBI and ALK7 homomultimers). In some embodiments, a BAMBI:ALK7 heteromultimer of the disclosure is a heterodimer.

[0062] In certain aspects, the disclosure relates to heteromultimers that comprise at least one BMPER polypeptide, which includes fragments, functional variants, and modified forms thereof, and at least one ALK1 polypeptide, which includes fragments, functional variants, and modified forms thereof. In some embodiments, the BMPER:ALK1 heteromultimer comprises a polypeptide that is at least 70%, 75%, 80%, 85%, 90%, 91%, 92%, 93%, 94%, 95%, 95%, 96%, 97%, 98%, 99%, or 100% identical to the amino acid sequence of any one of SEQ ID NOs: 553 or 554. In some embodiments, the BMPER:ALK1 heteromultimer comprises a polypeptide that is at least 70%, 75%, 80%, 85%, 90%, 91%, 92%, 93%, 94%, 95%, 95%, 96%, 97%, 98%, 99%, or 100% identical to a polypeptide that begins at any one of amino acids of 39-50 of SEQ ID NO: 553 and ends at any one of amino acids 364-369 of SEQ ID NO: 553. In some embodiments, the BMPER:ALK1 heteromultimer comprises a polypeptide that is at least 70%, 75%, 80%, 85%, 90%, 91%, 92%, 93%, 94%, 95%, 95%, 96%, 97%, 98%, 99%, or 100% identical to a polypeptide that begins at any one of amino acids of 370-386 of SEQ ID NO: 553 and ends at any one of amino acids 682-685 of SEQ ID NO: 553. In some embodiments, the BMPER:ALK1 heteromultimer comprises a polypeptide that is at least 70%, 75%, 80%, 85%, 90%, 91%, 92%, 93%, 94%, 95%, 95%, 96%, 97%, 98%, 99%, or 100% identical to a polypeptide that begins at any one of amino acids of 39-50 of SEQ ID NO: 553 and ends at any one of amino acids 682-685 of SEQ ID NO: 553. In some embodiments, the BMPER:ALK1 heteromultimer comprises a BMPER protein, wherein the BMPER protein is a dimer comprising a first polypeptide that is at least 70%, 75%, 80%, 85%, 90%, 91%, 92%, 93%, 94%, 95%, 96%, 97%, 98%, 99%, or 100% identical to a polypeptide that begins at any one of amino acids of 39-50 of SEQ ID NO: 553 and ends at any one of amino acids 364-369 of SEQ ID NO: 553, and second polypeptide that is at least 70%, 75%, 80%, 85%, 90%, 91%, 92%, 93%, 94%, 95%, 96%, 97%, 98%, 99%, or 100% identical to a polypeptide that begins at any one of amino acids of 370-386 of SEQ ID NO: 553, and ends at any one of amino acids 682-685 of SEQ ID NO: 553. In some embodiments, the BMPER:ALK1 heteromultimer comprises a single chain ligand trap that comprises a first BMPER polypeptide domain that is at least 70%, 75%, 80%, 85%, 90%, 91%, 92%, 93%, 94%, 95%, 96%, 97%, 98%, 99%, or 100% identical to a polypeptide that begins at any one of amino acids of 39-50 of SEQ ID NO: 553 and ends at any one of amino acids 364-369 of SEQ ID NO: 553, and second BMPER polypeptide domain that is at least 70%, 75%, 80%, 85%, 90%, 91%, 92%, 93%, 94%, 95%, 96%, 97%, 98%, 99%, or 100% identical to a polypeptide that begins at any one of amino acids of 370-386 of SEQ ID NO: 553 and ends at any one of amino acids 682-685 of SEQ ID NO: 553. In some embodiments, the BMPER:ALK1 heteromultimer comprises a polypeptide that is at least 70%, 75%, 80%, 85%, 90%, 91%, 92%, 93%, 94%, 95%, 95%, 96%, 97%, 98%, 99%, or 100% identical to the amino acid sequence of any one of SEQ ID NOs: 14 or 15. In some embodiments, the BMPER:ALK1 heteromultimer comprises a polypeptide that is at least 70%, 75%, 80%, 85%, 90%, 91%, 92%, 93%, 94%, 95%, 95%, 96%, 97%, 98%, 99%, or 100% identical to a polypeptide that begins at any one of amino acids of 22-34 of SEQ ID NO: 14 and ends at any one of amino acids 95-118 of SEQ ID NO: 14. In certain preferred embodiments, BMPER:ALK1 heteromultimers are soluble. In some embodiments, a BMPER:ALK1 heteromultimer of the disclosure binds to one or more TGF-beta superfamily ligands (e.g., binds to one or more TGF-beta superfamily ligands with a K_{D} of at least 1×10⁻⁷). In some embodiments, a BMPER:ALK1 heteromultimer of the disclosure inhibits one or more TGF-beta superfamily ligands (e.g., inhibits Smad signaling). Heteromultimer-ligand binding and inhibition may be determined using a variety of assays including, for example, those described herein (e.g., in vitro binding and/or cell-based signaling assays). In some embodiments, a BMPER:ALK1 heteromultimer of the disclosure has a different TGF-beta ligand binding and/or inhibition profile (specificity) compared to a corresponding homomultimer (e.g., BMPER and ALK1 homomultimers). In some embodiments, a BMPER:ALK1 heteromultimer of the disclosure is a heterodimer.

[0063] In certain aspects, the disclosure relates to heteromultimers that comprise at least one BMPER polypeptide, which includes fragments, functional variants, and modified forms thereof, and at least one ALK2 polypeptide, which includes fragments, functional variants, and modified forms thereof. In some embodiments, the BMPER:ALK2 heteromultimer comprises a polypeptide that is at least 70%, 75%, 80%, 85%, 90%, 91%, 92%, 93%, 94%, 95%, 95%, 96%, 97%, 98%, 99%, or 100% identical to the amino acid sequence of any one of SEQ ID NOs: 553 or 554. In some embodiments, the BMPER:ALK2 heteromultimer comprises a polypeptide that is at least 70%, 75%, 80%, 85%, 90%, 91%, 92%, 93%, 94%, 95%, 95%, 96%, 97%, 98%, 99%, or 100% identical to a polypeptide that begins at any one of amino acids of 39-50 of SEQ ID NO: 553 and ends at any one of amino acids 364-369 of SEQ ID NO: 553. In some embodiments, the BMPER:ALK2 heteromultimer comprises a polypeptide that is at least 70%, 75%, 80%, 85%, 90%, 91%, 92%, 93%, 94%, 95%, 95%, 96%, 97%, 98%, 99%, or 100% identical to a polypeptide that begins at any one of amino acids of 370-386 of SEQ ID NO: 553 and ends at any one of amino acids 682-685 of SEQ ID NO: 553. In some embodiments, the BMPER:ALK2 heteromultimer comprises a polypeptide that is at least 70%, 75%, 80%, 85%, 90%, 91%, 92%, 93%, 94%, 95%, 95%, 96%, 97%, 98%, 99%, or 100% identical to a polypeptide that begins at any one of amino acids of 39-50 of SEQ ID NO: 553 and ends at any one of amino acids 682-685 of SEQ ID NO: 553. In some embodiments, the BMPER:ALK2 heteromultimer comprises a BMPER protein, wherein the BMPER protein is a dimer comprising a first polypeptide that is at least 70%, 75%, 80%, 85%, 90%, 91%, 92%, 93%, 94%, 95%, 96%, 97%, 98%, 99%, or 100% identical to a polypeptide that begins at any one of amino acids of 39-50 of SEQ ID NO: 553 and ends at any one of amino acids 364-369 of SEQ ID NO: 553, and second polypeptide that is at least 70%, 75%, 80%, 85%, 90%, 91%, 92%, 93%, 94%, 95%, 96%, 97%, 98%, 99%, or 100% identical to a polypeptide that begins at any one of amino acids of 370-386 of SEQ ID NO: 553, and ends at any one of amino acids 682-685 of SEQ ID NO: 553. In some embodiments, the BMPER:ALK2 heteromultimer comprises a single chain ligand trap that comprises a first BMPER polypeptide domain that is at least 70%, 75%, 80%, 85%, 90%, 91%, 92%, 93%, 94%, 95%, 96%, 97%, 98%, 99%, or 100% identical to a polypeptide that begins at any one of amino acids of 39-50 of SEQ ID NO: 553 and ends at any one of amino acids 364-369 of SEQ ID NO: 553, and second BMPER polypeptide domain that is at least 70%, 75%, 80%, 85%, 90%, 91%, 92%, 93%, 94%, 95%, 96%, 97%, 98%, 99%, or 100% identical to a polypeptide that begins at any one of amino acids of 370-386 of SEQ ID NO: 553 and ends at any one of amino acids 682-685 of SEQ ID NO: 553. In some embodiments, the BMPER:ALK2 heteromultimer comprises a polypeptide that is at least 70%, 75%, 80%, 85%, 90%, 91%, 92%, 93%, 94%, 95%, 95%, 96%, 97%, 98%, 99%, or 100% identical to the amino acid sequence of any one of SEQ ID NOs: SEQ ID NO: 18 or 19. In some embodiments the BMPER:ALK2 heteromultimer comprises a polypeptide that is at least 70%, 75%, 80%, 85%, 90%, 91%, 92%, 93%, 94%, 95%, 95%, 96%, 97%, 98%, 99%, or 100% identical to a polypeptide that begins at any one of amino acids of 21-35 of SEQ ID NO: 18 and ends at any one of amino acids 99-123 of SEQ ID NO: 18. In certain preferred embodiments, BMPER:ALK2 heteromultimers are soluble. In some embodiments, a BMPER:ALK2 heteromultimer of the disclosure binds to one or more TGF-beta superfamily ligands (e.g., binds to one or more TGF-beta superfamily ligands with a K_{D} of at least 1×10⁻⁷). In some embodiments, a BMPER:ALK2 heteromultimer of the disclosure inhibits one or more TGF-beta superfamily ligands (e.g., inhibits Smad signaling). Heteromultimer-ligand binding and inhibition may be determined using a variety of assays including, for example, those described herein (e.g., in vitro binding and/or cell-based signaling assays). In some embodiments, a BMPER:ALK2 heteromultimer of the disclosure has a different TGF-beta ligand binding and/or inhibition profile (specificity) compared to a corresponding homomultimer (e.g., BMPER and ALK2 homomultimers). In some embodiments, a BMPER:ALK2 heteromultimer of the disclosure is a heterodimer.

[0064] In certain aspects, the disclosure relates to heteromultimers that comprise at least one BMPER polypeptide, which includes fragments, functional variants, and modified forms thereof, and at least one ALK3 polypeptide, which includes fragments, functional variants, and modified forms thereof. In some embodiments, the BMPER:ALK3 heteromultimer comprises a polypeptide that is at least 70%, 75%, 80%, 85%, 90%, 91%, 92%, 93%, 94%, 95%, 95%, 96%, 97%, 98%, 99%, or 100% identical to the amino acid sequence of any one of SEQ ID NOs: 553 or 554. In some embodiments, the BMPER:ALK3 heteromultimer comprises a polypeptide that is at least 70%, 75%, 80%, 85%, 90%, 91%, 92%, 93%, 94%, 95%, 95%, 96%, 97%, 98%, 99%, or 100% identical to a polypeptide that begins at any one of amino acids of 39-50 of SEQ ID NO: 553 and ends at any one of amino acids 364-369 of SEQ ID NO: 553. In some embodiments, the BMPER:ALK3 heteromultimer comprises a polypeptide that is at least 70%, 75%, 80%, 85%, 90%, 91%, 92%, 93%, 94%, 95%, 95%, 96%, 97%, 98%, 99%, or 100% identical to a polypeptide that begins at any one of amino acids of 370-386 of SEQ ID NO: 553 and ends at any one of amino acids 682-685 of SEQ ID NO: 553. In some embodiments, the BMPER:ALK3 heteromultimer comprises a polypeptide that is at least 70%, 75%, 80%, 85%, 90%, 91%, 92%, 93%, 94%, 95%, 95%, 96%, 97%, 98%, 99%, or 100% identical to a polypeptide that begins at any one of amino acids of 39-50 of SEQ ID NO: 553 and ends at any one of amino acids 682-685 of SEQ ID NO: 553. In some embodiments, the BMPER:ALK3 heteromultimer comprises a BMPER protein, wherein the BMPER protein is a dimer comprising a first polypeptide that is at least 70%, 75%, 80%, 85%, 90%, 91%, 92%, 93%, 94%, 95%, 96%, 97%, 98%, 99%, or 100% identical to a polypeptide that begins at any one of amino acids of 39-50 of SEQ ID NO: 553 and ends at any one of amino acids 364-369 of SEQ ID NO: 553, and second polypeptide that is at least 70%, 75%, 80%, 85%, 90%, 91%, 92%, 93%, 94%, 95%, 96%, 97%, 98%, 99%, or 100% identical to a polypeptide that begins at any one of amino acids of 370-386 of SEQ ID NO: 553, and ends at any one of amino acids 682-685 of SEQ ID NO: 553. In some embodiments, the BMPER:ALK3 heteromultimer comprises a single chain ligand trap that comprises a first BMPER polypeptide domain that is at least 70%, 75%, 80%, 85%, 90%, 91%, 92%, 93%, 94%, 95%, 96%, 97%, 98%, 99%, or 100% identical to a polypeptide that begins at any one of amino acids of 39-50 of SEQ ID NO: 553 and ends at any one of amino acids 364-369 of SEQ ID NO: 553, and second BMPER polypeptide domain that is at least 70%, 75%, 80%, 85%, 90%, 91%, 92%, 93%, 94%, 95%, 96%, 97%, 98%, 99%, or 100% identical to a polypeptide that begins at any one of amino acids of 370-386 of SEQ ID NO: 553 and ends at any one of amino acids 682-685 of SEQ ID NO: 553. In some embodiments, the BMPER:ALK3 heteromultimer comprises a polypeptide that is at least 70%, 75%, 80%, 85%, 90%, 91%, 92%, 93%, 94%, 95%, 95%, 96%, 97%, 98%, 99%, or 100% identical to the amino acid sequence of any one of SEQ ID NOs: SEQ ID NO: 22 or 23. In some embodiments the BMPER:ALK3 heteromultimer comprises a polypeptide that is at least 70%, 75%, 80%, 85%, 90%, 91%, 92%, 93%, 94%, 95%, 95%, 96%, 97%, 98%, 99%, or 100% identical to a polypeptide that begins at any one of amino acids of 24-61 of SEQ ID NO: 22 and ends at any one of amino acids 130-152 of SEQ ID NO: 22. In certain preferred embodiments, BMPER:ALK3 heteromultimers are soluble. In some embodiments, a BMPER:ALK3 heteromultimer of the disclosure binds to one or more TGF-beta superfamily ligands (e.g., binds to one or more TGF-beta superfamily ligands with a K_{D} of at least 1×10⁻⁷). In some embodiments, a BMPER:ALK3 heteromultimer of the disclosure inhibits one or more TGF-beta superfamily ligands (e.g., inhibits Smad signaling). Heteromultimer-ligand binding and inhibition may be determined using a variety of assays including, for example, those described herein (e.g., in vitro binding and/or cell-based signaling assays). In some embodiments, a BMPER:ALK3 heteromultimer of the disclosure has a different TGF-beta ligand binding and/or inhibition profile (specificity) compared to a corresponding homomultimer (e.g., BMPER and ALK3 homomultimers). In some embodiments, a BMPER:ALK3 heteromultimer of the disclosure is a heterodimer.

[0065] In certain aspects, the disclosure relates to heteromultimers that comprise at least one BMPER polypeptide, which includes fragments, functional variants, and modified forms thereof, and at least one ALK4 polypeptide, which includes fragments, functional variants, and modified forms thereof. In some embodiments, the BMPER:ALK4 heteromultimer comprises a polypeptide that is at least 70%, 75%, 80%, 85%, 90%, 91%, 92%, 93%, 94%, 95%, 95%, 96%, 97%, 98%, 99%, or 100% identical to the amino acid sequence of any one of SEQ ID NOs: 553 or 554. In some embodiments, the BMPER:ALK4 heteromultimer comprises a polypeptide that is at least 70%, 75%, 80%, 85%, 90%, 91%, 92%, 93%, 94%, 95%, 95%, 96%, 97%, 98%, 99%, or 100% identical to a polypeptide that begins at any one of amino acids of 39-50 of SEQ ID NO: 553 and ends at any one of amino acids 364-369 of SEQ ID NO: 553. In some embodiments, the BMPER:ALK4 heteromultimer comprises a polypeptide that is at least 70%, 75%, 80%, 85%, 90%, 91%, 92%, 93%, 94%, 95%, 95%, 96%, 97%, 98%, 99%, or 100% identical to a polypeptide that begins at any one of amino acids of 370-386 of SEQ ID NO: 553 and ends at any one of amino acids 682-685 of SEQ ID NO: 553. In some embodiments, the BMPER:ALK4 heteromultimer comprises a polypeptide that is at least 70%, 75%, 80%, 85%, 90%, 91%, 92%, 93%, 94%, 95%, 95%, 96%, 97%, 98%, 99%, or 100% identical to a polypeptide that begins at any one of amino acids of 39-50 of SEQ ID NO: 553 and ends at any one of amino acids 682-685 of SEQ ID NO: 553. In some embodiments, the BMPER:ALK4 heteromultimer comprises a BMPER protein, wherein the BMPER protein is a dimer comprising a first polypeptide that is at least 70%, 75%, 80%, 85%, 90%, 91%, 92%, 93%, 94%, 95%, 96%, 97%, 98%, 99%, or 100% identical to a polypeptide that begins at any one of amino acids of 39-50 of SEQ ID NO: 553 and ends at any one of amino acids 364-369 of SEQ ID NO: 553, and second polypeptide that is at least 70%, 75%, 80%, 85%, 90%, 91%, 92%, 93%, 94%, 95%, 96%, 97%, 98%, 99%, or 100% identical to a polypeptide that begins at any one of amino acids of 370-386 of SEQ ID NO: 553, and ends at any one of amino acids 682-685 of SEQ ID NO: 553. In some embodiments, the BMPER:ALK4 heteromultimer comprises a single chain ligand trap that comprises a first BMPER polypeptide domain that is at least 70%, 75%, 80%, 85%, 90%, 91%, 92%, 93%, 94%, 95%, 96%, 97%, 98%, 99%, or 100% identical to a polypeptide that begins at any one of amino acids of 39-50 of SEQ ID NO: 553 and ends at any one of amino acids 364-369 of SEQ ID NO: 553, and second BMPER polypeptide domain that is at least 70%, 75%, 80%, 85%, 90%, 91%, 92%, 93%, 94%, 95%, 96%, 97%, 98%, 99%, or 100% identical to a polypeptide that begins at any one of amino acids of 370-386 of SEQ ID NO: 553 and ends at any one of amino acids 682-685 of SEQ ID NO: 553. In some embodiments, the BMPER:ALK4 heteromultimer comprises a polypeptide that is at least 70%, 75%, 80%, 85%, 90%, 91%, 92%, 93%, 94%, 95%, 95%, 96%, 97%, 98%, 99%, or 100% identical to the amino acid sequence of any one of SEQ ID NOs: SEQ ID NO: 26, 27, 83, or 84. In some embodiments the BMPER:ALK4 heteromultimer comprises a polypeptide that is at least 70%, 75%, 80%, 85%, 90%, 91%, 92%, 93%, 94%, 95%, 95%, 96%, 97%, 98%, 99%, or 100% identical to a polypeptide that begins at any one of amino acids of 24-34 of SEQ ID NO: 26 and ends at any one of amino acids 101-126 of SEQ ID NO: 26. In some embodiments the BMPER:ALK4 heteromultimer comprises a polypeptide that is at least 70%, 75%, 80%, 85%, 90%, 91%, 92%, 93%, 94%, 95%, 95%, 96%, 97%, 98%, 99%, or 100% identical to a polypeptide that begins at any one of amino acids of 24-34 of SEQ ID NO: 83 and ends at any one of amino acids 101-126 of SEQ ID NO: 83. In certain preferred embodiments, BMPER:ALK4 heteromultimers are soluble. In some embodiments, a BMPER:ALK4 heteromultimer of the disclosure binds to one or more TGF-beta superfamily ligands (e.g., binds to one or more TGF-beta superfamily ligands with a K_{D} of at least 1×10⁻⁷). In some embodiments, a BMPER:ALK4 heteromultimer of the disclosure inhibits one or more TGF-beta superfamily ligands (e.g., inhibits Smad signaling). Heteromultimer-ligand binding and inhibition may be determined using a variety of assays including, for example, those described herein (e.g., in vitro binding and/or cell-based signaling assays). In some embodiments, a BMPER:ALK4 heteromultimer of the disclosure has a different TGF-beta ligand binding and/or inhibition profile (specificity) compared to a corresponding homomultimer (e.g., BMPER and ALK4 homomultimers). In some embodiments, a BMPER:ALK4 heteromultimer of the disclosure is a heterodimer.

[0066] In certain aspects, the disclosure relates to heteromultimers that comprise at least one BMPER polypeptide, which includes fragments, functional variants, and modified forms thereof, and at least one ALK5 polypeptide, which includes fragments, functional variants, and modified forms thereof. In some embodiments, the BMPER:ALK5 heteromultimer comprises a polypeptide that is at least 70%, 75%, 80%, 85%, 90%, 91%, 92%, 93%, 94%, 95%, 95%, 96%, 97%, 98%, 99%, or 100% identical to the amino acid sequence of any one of SEQ ID NOs: 553 or 554. In some embodiments, the BMPER:ALK5 heteromultimer comprises a polypeptide that is at least 70%, 75%, 80%, 85%, 90%, 91%, 92%, 93%, 94%, 95%, 95%, 96%, 97%, 98%, 99%, or 100% identical to a polypeptide that begins at any one of amino acids of 39-50 of SEQ ID NO: 553 and ends at any one of amino acids 364-369 of SEQ ID NO: 553. In some embodiments, the BMPER:ALK5 heteromultimer comprises a polypeptide that is at least 70%, 75%, 80%, 85%, 90%, 91%, 92%, 93%, 94%, 95%, 95%, 96%, 97%, 98%, 99%, or 100% identical to a polypeptide that begins at any one of amino acids of 370-386 of SEQ ID NO: 553 and ends at any one of amino acids 682-685 of SEQ ID NO: 553. In some embodiments, the BMPER:ALK5 heteromultimer comprises a polypeptide that is at least 70%, 75%, 80%, 85%, 90%, 91%, 92%, 93%, 94%, 95%, 95%, 96%, 97%, 98%, 99%, or 100% identical to a polypeptide that begins at any one of amino acids of 39-50 of SEQ ID NO: 553 and ends at any one of amino acids 682-685 of SEQ ID NO: 553. In some embodiments, the BMPER:ALK5 heteromultimer comprises a BMPER protein, wherein the BMPER protein is a dimer comprising a first polypeptide that is at least 70%, 75%, 80%, 85%, 90%, 91%, 92%, 93%, 94%, 95%, 96%, 97%, 98%, 99%, or 100% identical to a polypeptide that begins at any one of amino acids of 39-50 of SEQ ID NO: 553 and ends at any one of amino acids 364-369 of SEQ ID NO: 553, and second polypeptide that is at least 70%, 75%, 80%, 85%, 90%, 91%, 92%, 93%, 94%, 95%, 96%, 97%, 98%, 99%, or 100% identical to a polypeptide that begins at any one of amino acids of 370-386 of SEQ ID NO: 553, and ends at any one of amino acids 682-685 of SEQ ID NO: 553. In some embodiments, the BMPER:ALK5 heteromultimer comprises a single chain ligand trap that comprises a first BMPER polypeptide domain that is at least 70%, 75%, 80%, 85%, 90%, 91%, 92%, 93%, 94%, 95%, 96%, 97%, 98%, 99%, or 100% identical to a polypeptide that begins at any one of amino acids of 39-50 of SEQ ID NO: 553 and ends at any one of amino acids 364-369 of SEQ ID NO: 553, and second BMPER polypeptide domain that is at least 70%, 75%, 80%, 85%, 90%, 91%, 92%, 93%, 94%, 95%, 96%, 97%, 98%, 99%, or 100% identical to a polypeptide that begins at any one of amino acids of 370-386 of SEQ ID NO: 553 and ends at any one of amino acids 682-685 of SEQ ID NO: 553. In some embodiments, the BMPER:ALK5 heteromultimer comprises a polypeptide that is at least 70%, 75%, 80%, 85%, 90%, 91%, 92%, 93%, 94%, 95%, 95%, 96%, 97%, 98%, 99%, or 100% identical to the amino acid sequence of any one of SEQ ID NOs: SEQ ID NO: 30, 31, 87, or 88. In some embodiments the BMPER:ALK5 heteromultimer comprises a polypeptide that is at least 70%, 75%, 80%, 85%, 90%, 91%, 92%, 93%, 94%, 95%, 95%, 96%, 97%, 98%, 99%, or 100% identical to a polypeptide that begins at any one of amino acids of 25-36 of SEQ ID NO: 30 and ends at any one of amino acids 101-126 of SEQ ID NO: 30. In some embodiments the BMPER:ALK5 heteromultimer comprises a polypeptide that is at least 70%, 75%, 80%, 85%, 90%, 91%, 92%, 93%, 94%, 95%, 95%, 96%, 97%, 98%, 99%, or 100% identical to a polypeptide that begins at any one of amino acids of 25-36 of SEQ ID NO: 87 and ends at any one of amino acids 101-130 of SEQ ID NO: 87. In certain preferred embodiments, BMPER:ALK5 heteromultimers are soluble. In some embodiments, a BMPER:ALK5 heteromultimer of the disclosure binds to one or more TGF-beta superfamily ligands (e.g., binds to one or more TGF-beta superfamily ligands with a K_{D} of at least 1×10⁻⁷). In some embodiments, a BMPER:ALK5 heteromultimer of the disclosure inhibits one or more TGF-beta superfamily ligands (e.g., inhibits Smad signaling). Heteromultimer-ligand binding and inhibition may be determined using a variety of assays including, for example, those described herein (e.g., in vitro binding and/or cell-based signaling assays). In some embodiments, a BMPER:ALK5 heteromultimer of the disclosure has a different TGF-beta ligand binding and/or inhibition profile (specificity) compared to a corresponding homomultimer (e.g., BMPER and ALK5 homomultimers). In some embodiments, a BMPER:ALK5 heteromultimer of the disclosure is a heterodimer.

[0067] In certain aspects, the disclosure relates to heteromultimers that comprise at least one BMPER polypeptide, which includes fragments, functional variants, and modified forms thereof, and at least one ALK6 polypeptide, which includes fragments, functional variants, and modified forms thereof. In some embodiments, the BMPER:ALK6 heteromultimer comprises a polypeptide that is at least 70%, 75%, 80%, 85%, 90%, 91%, 92%, 93%, 94%, 95%, 95%, 96%, 97%, 98%, 99%, or 100% identical to the amino acid sequence of any one of SEQ ID NOs: 553 or 554. In some embodiments, the BMPER:ALK6 heteromultimer comprises a polypeptide that is at least 70%, 75%, 80%, 85%, 90%, 91%, 92%, 93%, 94%, 95%, 95%, 96%, 97%, 98%, 99%, or 100% identical to a polypeptide that begins at any one of amino acids of 39-50 of SEQ ID NO: 553 and ends at any one of amino acids 364-369 of SEQ ID NO: 553. In some embodiments, the BMPER:ALK6 heteromultimer comprises a polypeptide that is at least 70%, 75%, 80%, 85%, 90%, 91%, 92%, 93%, 94%, 95%, 95%, 96%, 97%, 98%, 99%, or 100% identical to a polypeptide that begins at any one of amino acids of 370-386 of SEQ ID NO: 553 and ends at any one of amino acids 682-685 of SEQ ID NO: 553. In some embodiments, the BMPER:ALK6 heteromultimer comprises a polypeptide that is at least 70%, 75%, 80%, 85%, 90%, 91%, 92%, 93%, 94%, 95%, 95%, 96%, 97%, 98%, 99%, or 100% identical to a polypeptide that begins at any one of amino acids of 39-50 of SEQ ID NO: 553 and ends at any one of amino acids 682-685 of SEQ ID NO: 553. In some embodiments, the BMPER:ALK6 heteromultimer comprises a BMPER protein, wherein the BMPER protein is a dimer comprising a first polypeptide that is at least 70%, 75%, 80%, 85%, 90%, 91%, 92%, 93%, 94%, 95%, 96%, 97%, 98%, 99%, or 100% identical to a polypeptide that begins at any one of amino acids of 39-50 of SEQ ID NO: 553 and ends at any one of amino acids 364-369 of SEQ ID NO: 553, and second polypeptide that is at least 70%, 75%, 80%, 85%, 90%, 91%, 92%, 93%, 94%, 95%, 96%, 97%, 98%, 99%, or 100% identical to a polypeptide that begins at any one of amino acids of 370-386 of SEQ ID NO: 553, and ends at any one of amino acids 682-685 of SEQ ID NO: 553. In some embodiments, the BMPER:ALK6 heteromultimer comprises a single chain ligand trap that comprises a first BMPER polypeptide domain that is at least 70%, 75%, 80%, 85%, 90%, 91%, 92%, 93%, 94%, 95%, 96%, 97%, 98%, 99%, or 100% identical to a polypeptide that begins at any one of amino acids of 39-50 of SEQ ID NO: 553 and ends at any one of amino acids 364-369 of SEQ ID NO: 553, and second BMPER polypeptide domain that is at least 70%, 75%, 80%, 85%, 90%, 91%, 92%, 93%, 94%, 95%, 96%, 97%, 98%, 99%, or 100% identical to a polypeptide that begins at any one of amino acids of 370-386 of SEQ ID NO: 553 and ends at any one of amino acids 682-685 of SEQ ID NO: 553. In some embodiments, the BMPER:ALK6 heteromultimer comprises a polypeptide that is at least 70%, 75%, 80%, 85%, 90%, 91%, 92%, 93%, 94%, 95%, 95%, 96%, 97%, 98%, 99%, or 100% identical to the amino acid sequence of any one of SEQ ID NOs: SEQ ID NO: 34, 35, 91, or 92. In some embodiments the BMPER:ALK6 heteromultimer comprises a polypeptide that is at least 70%, 75%, 80%, 85%, 90%, 91%, 92%, 93%, 94%, 95%, 95%, 96%, 97%, 98%, 99%, or 100% identical to a polypeptide that begins at any one of amino acids of 14-32 of SEQ ID NO: 34 and ends at any one of amino acids 102-126 of SEQ ID NO: 34. In some embodiments the BMPER:ALK6 heteromultimer comprises a polypeptide that is at least 70%, 75%, 80%, 85%, 90%, 91%, 92%, 93%, 94%, 95%, 95%, 96%, 97%, 98%, 99%, or 100% identical to a polypeptide that begins at any one of amino acids of 26-62 of SEQ ID NO: 91 and ends at any one of amino acids 132-156 of SEQ ID NO: 91. In certain preferred embodiments, BMPER:ALK6 heteromultimers are soluble. In some embodiments, a BMPER:ALK6 heteromultimer of the disclosure binds to one or more TGF-beta superfamily ligands (e.g., binds to one or more TGF-beta superfamily ligands with a K_{D} of at least 1×10⁻⁷). In some embodiments, a BMPER:ALK6 heteromultimer of the disclosure inhibits one or more TGF-beta superfamily ligands (e.g., inhibits Smad signaling). Heteromultimer-ligand binding and inhibition may be determined using a variety of assays including, for example, those described herein (e.g., in vitro binding and/or cell-based signaling assays). In some embodiments, a BMPER:ALK6 heteromultimer of the disclosure has a different TGF-beta ligand binding and/or inhibition profile (specificity) compared to a corresponding homomultimer (e.g., BMPER and ALK6 homomultimers). In some embodiments, a BMPER:ALK6 heteromultimer of the disclosure is a heterodimer.

[0068] In certain aspects, the disclosure relates to heteromultimers that comprise at least one BMPER polypeptide, which includes fragments, functional variants, and modified forms thereof, and at least one ALK7 polypeptide, which includes fragments, functional variants, and modified forms thereof. In some embodiments, the BMPER:ALK7 heteromultimer comprises a polypeptide that is at least 70%, 75%, 80%, 85%, 90%, 91%, 92%, 93%, 94%, 95%, 95%, 96%, 97%, 98%, 99%, or 100% identical to the amino acid sequence of any one of SEQ ID NOs: 553 or 554. In some embodiments, the BMPER:ALK7 heteromultimer comprises a polypeptide that is at least 70%, 75%, 80%, 85%, 90%, 91%, 92%, 93%, 94%, 95%, 95%, 96%, 97%, 98%, 99%, or 100% identical to a polypeptide that begins at any one of amino acids of 39-50 of SEQ ID NO: 553 and ends at any one of amino acids 364-369 of SEQ ID NO: 553. In some embodiments, the BMPER:ALK7 heteromultimer comprises a polypeptide that is at least 70%, 75%, 80%, 85%, 90%, 91%, 92%, 93%, 94%, 95%, 95%, 96%, 97%, 98%, 99%, or 100% identical to a polypeptide that begins at any one of amino acids of 370-386 of SEQ ID NO: 553 and ends at any one of amino acids 682-685 of SEQ ID NO: 553. In some embodiments, the BMPER:ALK7 heteromultimer comprises a polypeptide that is at least 70%, 75%, 80%, 85%, 90%, 91%, 92%, 93%, 94%, 95%, 95%, 96%, 97%, 98%, 99%, or 100% identical to a polypeptide that begins at any one of amino acids of 39-50 of SEQ ID NO: 553 and ends at any one of amino acids 682-685 of SEQ ID NO: 553. In some embodiments, the BMPER:ALK7 heteromultimer comprises a BMPER protein, wherein the BMPER protein is a dimer comprising a first polypeptide that is at least 70%, 75%, 80%, 85%, 90%, 91%, 92%, 93%, 94%, 95%, 96%, 97%, 98%, 99%, or 100% identical to a polypeptide that begins at any one of amino acids of 39-50 of SEQ ID NO: 553 and ends at any one of amino acids 364-369 of SEQ ID NO: 553, and second polypeptide that is at least 70%, 75%, 80%, 85%, 90%, 91%, 92%, 93%, 94%, 95%, 96%, 97%, 98%, 99%, or 100% identical to a polypeptide that begins at any one of amino acids of 370-386 of SEQ ID NO: 553, and ends at any one of amino acids 682-685 of SEQ ID NO: 553. In some embodiments, the BMPER:ALK7 heteromultimer comprises a single chain ligand trap that comprises a first BMPER polypeptide domain that is at least 70%, 75%, 80%, 85%, 90%, 91%, 92%, 93%, 94%, 95%, 96%, 97%, 98%, 99%, or 100% identical to a polypeptide that begins at any one of amino acids of 39-50 of SEQ ID NO: 553 and ends at any one of amino acids 364-369 of SEQ ID NO: 553, and second BMPER polypeptide domain that is at least 70%, 75%, 80%, 85%, 90%, 91%, 92%, 93%, 94%, 95%, 96%, 97%, 98%, 99%, or 100% identical to a polypeptide that begins at any one of amino acids of 370-386 of SEQ ID NO: 553 and ends at any one of amino acids 682-685 of SEQ ID NO: 553. In some embodiments, the BMPER:ALK7 heteromultimer comprises a polypeptide that is at least 70%, 75%, 80%, 85%, 90%, 91%, 92%, 93%, 94%, 95%, 95%, 96%, 97%, 98%, 99%, or 100% identical to the amino acid sequence of any one of SEQ ID NOs: SEQ ID NO: 38, 39, 301, 302, 305, 306, 309, 310, or 313. In some embodiments the BMPER:ALK7 heteromultimer comprises a polypeptide that is at least 70%, 75%, 80%, 85%, 90%, 91%, 92%, 93%, 94%, 95%, 95%, 96%, 97%, 98%, 99%, or 100% identical to a polypeptide that begins at any one of amino acids of 21-28 of SEQ ID NO: 38 and ends at any one of amino acids 92-113 of SEQ ID NO: 38. In some embodiments the BMPER:ALK7 heteromultimer comprises a polypeptide that is at least 70%, 75%, 80%, 85%, 90%, 91%, 92%, 93%, 94%, 95%, 95%, 96%, 97%, 98%, 99%, or 100% identical to a polypeptide that begins at any one of amino acids of 1-13 of SEQ ID NO: 301 and ends at any one of amino acids 42-63 of SEQ ID NO: 301. In some embodiments the BMPER:ALK7 heteromultimer comprises a polypeptide that is at least 70%, 75%, 80%, 85%, 90%, 91%, 92%, 93%, 94%, 95%, 95%, 96%, 97%, 98%, 99%, or 100% identical to a polypeptide that begins at any one of amino acids of 21-28 of SEQ ID NO: 305 and ends at any one of amino acids 411-413 of SEQ ID NO: 305. In some embodiments the BMPER:ALK7 heteromultimer comprises a polypeptide that is at least 70%, 75%, 80%, 85%, 90%, 91%, 92%, 93%, 94%, 95%, 95%, 96%, 97%, 98%, 99%, or 100% identical to a polypeptide that begins at any one of amino acids of 21-28 of SEQ ID NO: 309 and ends at any one of amino acids 334-336 of SEQ ID NO: 309. In certain preferred embodiments, BMPER:ALK7 heteromultimers are soluble. In some embodiments, a BMPER:ALK7 heteromultimer of the disclosure binds to one or more TGF-beta superfamily ligands (e.g., binds to one or more TGF-beta superfamily ligands with a K_{D} of at least 1×10⁻⁷). In some embodiments, a BMPER:ALK7 heteromultimer of the disclosure inhibits one or more TGF-beta superfamily ligands (e.g., inhibits Smad signaling). Heteromultimer-ligand binding and inhibition may be determined using a variety of assays including, for example, those described herein (e.g., in vitro binding and/or cell-based signaling assays). In some embodiments, a BMPER:ALK7 heteromultimer of the disclosure has a different TGF-beta ligand binding and/or inhibition profile (specificity) compared to a corresponding homomultimer (e.g., BMPER and ALK7 homomultimers). In some embodiments, a BMPER:ALK7 heteromultimer of the disclosure is a heterodimer.

[0069] In certain aspects, the disclosure relates to heteromultimers that comprise at least one RGM-A polypeptide, which includes fragments, functional variants, and modified forms thereof, and at least one ALK1 polypeptide, which includes fragments, functional variants, and modified forms thereof. In some embodiments, the RGM-A:ALK1 heteromultimer comprises a polypeptide that is at least 70%, 75%, 80%, 85%, 90%, 91%, 92%, 93%, 94%, 95%, 95%, 96%, 97%, 98%, 99%, or 100% identical to the amino acid sequence of any one of SEQ ID NOs: 553 or 554. In some embodiments, the RGM-A:ALK1 heteromultimer comprises a polypeptide that is at least 70%, 75%, 80%, 85%, 90%, 91%, 92%, 93%, 94%, 95%, 95%, 96%, 97%, 98%, 99%, or 100% identical to a polypeptide that begins at any one of amino acids of 1-177 of SEQ ID NO: 561 and ends at any one of amino acids 430-458 of SEQ ID NO: 561. In some embodiments, the RGM-A:ALK1 heteromultimer comprises a polypeptide that is at least 70%, 75%, 80%, 85%, 90%, 91%, 92%, 93%, 94%, 95%, 95%, 96%, 97%, 98%, 99%, or 100% identical to a polypeptide that begins at any one of amino acids of 1-153 of SEQ ID NO: 565 and ends at any one of amino acids 406-434 of SEQ ID NO: 565. In some embodiments, the RGM-A:ALK1 heteromultimer comprises a polypeptide that is at least 70%, 75%, 80%, 85%, 90%, 91%, 92%, 93%, 94%, 95%, 95%, 96%, 97%, 98%, 99%, or 100% identical to a polypeptide that begins at any one of amino acids of 1-169 of SEQ ID NO: 569 and ends at any one of amino acids 422-450 of SEQ ID NO: 569. In some embodiments, the RGM-A:ALK1 heteromultimer comprises a polypeptide that is at least 70%, 75%, 80%, 85%, 90%, 91%, 92%, 93%, 94%, 95%, 95%, 96%, 97%, 98%, 99%, or 100% identical to the amino acid sequence of any one of SEQ ID NOs: 14 or 15. In some embodiments, the RGM-A:ALK1 heteromultimer comprises a polypeptide that is at least 70%, 75%, 80%, 85%, 90%, 91%, 92%, 93%, 94%, 95%, 95%, 96%, 97%, 98%, 99%, or 100% identical to a polypeptide that begins at any one of amino acids of 22-34 of SEQ ID NO: 14 and ends at any one of amino acids 95-118 of SEQ ID NO: 14. In certain preferred embodiments, RGM-A:ALK1 heteromultimers are soluble. In some embodiments, a RGM-A:ALK heteromultimer of the disclosure binds to one or more TGF-beta superfamily ligands (e.g., binds to one or more TGF-beta superfamily ligands with a K_{D} of at least 1×10⁻⁷). In some embodiments, a RGM-A:ALK1 heteromultimer of the disclosure inhibits one or more TGF-beta superfamily ligands (e.g., inhibits Smad signaling). Heteromultimer-ligand binding and inhibition may be determined using a variety of assays including, for example, those described herein (e.g., in vitro binding and/or cell-based signaling assays). In some embodiments, a RGM-A:ALK1 heteromultimer of the disclosure has a different TGF-beta ligand binding and/or inhibition profile (specificity) compared to a corresponding homomultimer (e.g., RGM-A and ALK1 homomultimers). In some embodiments, a RGM-A:ALK1 heteromultimer of the disclosure is a heterodimer.

[0070] In certain aspects, the disclosure relates to heteromultimers that comprise at least one RGM-A polypeptide, which includes fragments, functional variants, and modified forms thereof, and at least one ALK2 polypeptide, which includes fragments, functional variants, and modified forms thereof. In some embodiments, the RGM-A:ALK2 heteromultimer comprises a polypeptide that is at least 70%, 75%, 80%, 85%, 90%, 91%, 92%, 93%, 94%, 95%, 95%, 96%, 97%, 98%, 99%, or 100% identical to the amino acid sequence of any one of SEQ ID NOs: 553 or 554. In some embodiments, the RGM-A:ALK2 heteromultimer comprises a polypeptide that is at least 70%, 75%, 80%, 85%, 90%, 91%, 92%, 93%, 94%, 95%, 95%, 96%, 97%, 98%, 99%, or 100% identical to a polypeptide that begins at any one of amino acids of 1-177 of SEQ ID NO: 561 and ends at any one of amino acids 430-458 of SEQ ID NO: 561. In some embodiments, the RGM-A:ALK2 heteromultimer comprises a polypeptide that is at least 70%, 75%, 80%, 85%, 90%, 91%, 92%, 93%, 94%, 95%, 95%, 96%, 97%, 98%, 99%, or 100% identical to a polypeptide that begins at any one of amino acids of 1-153 of SEQ ID NO: 565 and ends at any one of amino acids 406-434 of SEQ ID NO: 565. In some embodiments, the RGM-A:ALK2 heteromultimer comprises a polypeptide that is at least 70%, 75%, 80%, 85%, 90%, 91%, 92%, 93%, 94%, 95%, 95%, 96%, 97%, 98%, 99%, or 100% identical to a polypeptide that begins at any one of amino acids of 1-169 of SEQ ID NO: 569 and ends at any one of amino acids 422-450 of SEQ ID NO: 569. In some embodiments, the RGM-A:ALK2 heteromultimer comprises a polypeptide that is at least 70%, 75%, 80%, 85%, 90%, 91%, 92%, 93%, 94%, 95%, 95%, 96%, 97%, 98%, 99%, or 100% identical to the amino acid sequence of any one of SEQ ID NOs: SEQ ID NO: 18 or 19. In some embodiments the RGM-A:ALK2 heteromultimer comprises a polypeptide that is at least 70%, 75%, 80%, 85%, 90%, 91%, 92%, 93%, 94%, 95%, 95%, 96%, 97%, 98%, 99%, or 100% identical to a polypeptide that begins at any one of amino acids of 21-35 of SEQ ID NO: 18 and ends at any one of amino acids 99-123 of SEQ ID NO: 18. In certain preferred embodiments, RGM-A:ALK2 heteromultimers are soluble. In some embodiments, a RGM-A:ALK2 heteromultimer of the disclosure binds to one or more TGF-beta superfamily ligands (e.g., binds to one or more TGF-beta superfamily ligands with a K_{D} of at least 1×10⁻⁷). In some embodiments, a RGM-A:ALK2 heteromultimer of the disclosure inhibits one or more TGF-beta superfamily ligands (e.g., inhibits Smad signaling). Heteromultimer-ligand binding and inhibition may be determined using a variety of assays including, for example, those described herein (e.g., in vitro binding and/or cell-based signaling assays). In some embodiments, a RGM-A:ALK2 heteromultimer of the disclosure has a different TGF-beta ligand binding and/or inhibition profile (specificity) compared to a corresponding homomultimer (e.g., RGM-A and ALK2 homomultimers). In some embodiments, a RGM-A:ALK2 heteromultimer of the disclosure is a heterodimer.

[0071] In certain aspects, the disclosure relates to heteromultimers that comprise at least one RGM-A polypeptide, which includes fragments, functional variants, and modified forms thereof, and at least one ALK3 polypeptide, which includes fragments, functional variants, and modified forms thereof. In some embodiments, the RGM-A:ALK3 heteromultimer comprises a polypeptide that is at least 70%, 75%, 80%, 85%, 90%, 91%, 92%, 93%, 94%, 95%, 95%, 96%, 97%, 98%, 99%, or 100% identical to the amino acid sequence of any one of SEQ ID NOs: 553 or 554. In some embodiments, the RGM-A:ALK3 heteromultimer comprises a polypeptide that is at least 70%, 75%, 80%, 85%, 90%, 91%, 92%, 93%, 94%, 95%, 95%, 96%, 97%, 98%, 99%, or 100% identical to a polypeptide that begins at any one of amino acids of 1-177 of SEQ ID NO: 561 and ends at any one of amino acids 430-458 of SEQ ID NO: 561. In some embodiments, the RGM-A:ALK3 heteromultimer comprises a polypeptide that is at least 70%, 75%, 80%, 85%, 90%, 91%, 92%, 93%, 94%, 95%, 95%, 96%, 97%, 98%, 99%, or 100% identical to a polypeptide that begins at any one of amino acids of 1-153 of SEQ ID NO: 565 and ends at any one of amino acids 406-434 of SEQ ID NO: 565. In some embodiments, the RGM-A:ALK3 heteromultimer comprises a polypeptide that is at least 70%, 75%, 80%, 85%, 90%, 91%, 92%, 93%, 94%, 95%, 95%, 96%, 97%, 98%, 99%, or 100% identical to a polypeptide that begins at any one of amino acids of 1-169 of SEQ ID NO: 569 and ends at any one of amino acids 422-450 of SEQ ID NO: 569. In some embodiments, the RGM-A:ALK3 heteromultimer comprises a polypeptide that is at least 70%, 75%, 80%, 85%, 90%, 91%, 92%, 93%, 94%, 95%, 95%, 96%, 97%, 98%, 99%, or 100% identical to the amino acid sequence of any one of SEQ ID NOs: SEQ ID NO: 22 or 23. In some embodiments the RGM-A:ALK3 heteromultimer comprises a polypeptide that is at least 70%, 75%, 80%, 85%, 90%, 91%, 92%, 93%, 94%, 95%, 95%, 96%, 97%, 98%, 99%, or 100% identical to a polypeptide that begins at any one of amino acids of 24-61 of SEQ ID NO: 22 and ends at any one of amino acids 130-152 of SEQ ID NO: 22. In certain preferred embodiments, RGM-A:ALK3 heteromultimers are soluble. In some embodiments, a RGM-A:ALK3 heteromultimer of the disclosure binds to one or more TGF-beta superfamily ligands (e.g., binds to one or more TGF-beta superfamily ligands with a K_{D} of at least 1×10⁻⁷). In some embodiments, a RGM-A:ALK3 heteromultimer of the disclosure inhibits one or more TGF-beta superfamily ligands (e.g., inhibits Smad signaling). Heteromultimer-ligand binding and inhibition may be determined using a variety of assays including, for example, those described herein (e.g., in vitro binding and/or cell-based signaling assays). In some embodiments, a RGM-A:ALK3 heteromultimer of the disclosure has a different TGF-beta ligand binding and/or inhibition profile (specificity) compared to a corresponding homomultimer (e.g., RGM-A and ALK3 homomultimers). In some embodiments, a RGM-A:ALK3 heteromultimer of the disclosure is a heterodimer.

[0072] In certain aspects, the disclosure relates to heteromultimers that comprise at least one RGM-A polypeptide, which includes fragments, functional variants, and modified forms thereof, and at least one ALK4 polypeptide, which includes fragments, functional variants, and modified forms thereof. In some embodiments, the RGM-A:ALK4 heteromultimer comprises a polypeptide that is at least 70%, 75%, 80%, 85%, 90%, 91%, 92%, 93%, 94%, 95%, 95%, 96%, 97%, 98%, 99%, or 100% identical to the amino acid sequence of any one of SEQ ID NOs: 553 or 554. In some embodiments, the RGM-A:ALK4 heteromultimer comprises a polypeptide that is at least 70%, 75%, 80%, 85%, 90%, 91%, 92%, 93%, 94%, 95%, 95%, 96%, 97%, 98%, 99%, or 100% identical to a polypeptide that begins at any one of amino acids of 1-177 of SEQ ID NO: 561 and ends at any one of amino acids 430-458 of SEQ ID NO: 561. In some embodiments, the RGM-A:ALK4 heteromultimer comprises a polypeptide that is at least 70%, 75%, 80%, 85%, 90%, 91%, 92%, 93%, 94%, 95%, 95%, 96%, 97%, 98%, 99%, or 100% identical to a polypeptide that begins at any one of amino acids of 1-153 of SEQ ID NO: 565 and ends at any one of amino acids 406-434 of SEQ ID NO: 565. In some embodiments, the RGM-A:ALK4 heteromultimer comprises a polypeptide that is at least 70%, 75%, 80%, 85%, 90%, 91%, 92%, 93%, 94%, 95%, 95%, 96%, 97%, 98%, 99%, or 100% identical to a polypeptide that begins at any one of amino acids of 1-169 of SEQ ID NO: 569 and ends at any one of amino acids 422-450 of SEQ ID NO: 569. In some embodiments, the RGM-A:ALK4 heteromultimer comprises a polypeptide that is at least 70%, 75%, 80%, 85%, 90%, 91%, 92%, 93%, 94%, 95%, 95%, 96%, 97%, 98%, 99%, or 100% identical to the amino acid sequence of any one of SEQ ID NOs: SEQ ID NO: 26, 27, 83, or 84. In some embodiments the RGM-A:ALK4 heteromultimer comprises a polypeptide that is at least 70%, 75%, 80%, 85%, 90%, 91%, 92%, 93%, 94%, 95%, 95%, 96%, 97%, 98%, 99%, or 100% identical to a polypeptide that begins at any one of amino acids of 24-34 of SEQ ID NO: 26 and ends at any one of amino acids 101-126 of SEQ ID NO: 26. In some embodiments the RGM-A:ALK4 heteromultimer comprises a polypeptide that is at least 70%, 75%, 80%, 85%, 90%, 91%, 92%, 93%, 94%, 95%, 95%, 96%, 97%, 98%, 99%, or 100% identical to a polypeptide that begins at any one of amino acids of 24-34 of SEQ ID NO: 83 and ends at any one of amino acids 101-126 of SEQ ID NO: 83. In certain preferred embodiments, RGM-A:ALK4 heteromultimers are soluble. In some embodiments, a RGM-A:ALK4 heteromultimer of the disclosure binds to one or more TGF-beta superfamily ligands (e.g., binds to one or more TGF-beta superfamily ligands with a K_{D} of at least 1×10⁻⁷). In some embodiments, a RGM-A:ALK4 heteromultimer of the disclosure inhibits one or more TGF-beta superfamily ligands (e.g., inhibits Smad signaling). Heteromultimer-ligand binding and inhibition may be determined using a variety of assays including, for example, those described herein (e.g., in vitro binding and/or cell-based signaling assays). In some embodiments, a RGM-A:ALK4 heteromultimer of the disclosure has a different TGF-beta ligand binding and/or inhibition profile (specificity) compared to a corresponding homomultimer (e.g., RGM-A and ALK4 homomultimers). In some embodiments, a RGM-A:ALK4 heteromultimer of the disclosure is a heterodimer.

[0073] In certain aspects, the disclosure relates to heteromultimers that comprise at least one RGM-A polypeptide, which includes fragments, functional variants, and modified forms thereof, and at least one ALK5 polypeptide, which includes fragments, functional variants, and modified forms thereof. In some embodiments, the RGM-A:ALK5 heteromultimer comprises a polypeptide that is at least 70%, 75%, 80%, 85%, 90%, 91%, 92%, 93%, 94%, 95%, 95%, 96%, 97%, 98%, 99%, or 100% identical to the amino acid sequence of any one of SEQ ID NOs: 553 or 554. In some embodiments, the RGM-A:ALK5 heteromultimer comprises a polypeptide that is at least 70%, 75%, 80%, 85%, 90%, 91%, 92%, 93%, 94%, 95%, 95%, 96%, 97%, 98%, 99%, or 100% identical to a polypeptide that begins at any one of amino acids of 1-177 of SEQ ID NO: 561 and ends at any one of amino acids 430-458 of SEQ ID NO: 561. In some embodiments, the RGM-A:ALK5 heteromultimer comprises a polypeptide that is at least 70%, 75%, 80%, 85%, 90%, 91%, 92%, 93%, 94%, 95%, 95%, 96%, 97%, 98%, 99%, or 100% identical to a polypeptide that begins at any one of amino acids of 1-153 of SEQ ID NO: 565 and ends at any one of amino acids 406-434 of SEQ ID NO: 565. In some embodiments, the RGM-A:ALK5 heteromultimer comprises a polypeptide that is at least 70%, 75%, 80%, 85%, 90%, 91%, 92%, 93%, 94%, 95%, 95%, 96%, 97%, 98%, 99%, or 100% identical to a polypeptide that begins at any one of amino acids of 1-169 of SEQ ID NO: 569 and ends at any one of amino acids 422-450 of SEQ ID NO: 569. In some embodiments, the RGM-A:ALK5 heteromultimer comprises a polypeptide that is at least 70%, 75%, 80%, 85%, 90%, 91%, 92%, 93%, 94%, 95%, 95%, 96%, 97%, 98%, 99%, or 100% identical to the amino acid sequence of any one of SEQ ID NOs: SEQ ID NO: 30, 31, 87, or 88. In some embodiments the RGM-A:ALK5 heteromultimer comprises a polypeptide that is at least 70%, 75%, 80%, 85%, 90%, 91%, 92%, 93%, 94%, 95%, 95%, 96%, 97%, 98%, 99%, or 100% identical to a polypeptide that begins at any one of amino acids of 25-36 of SEQ ID NO: 30 and ends at any one of amino acids 101-126 of SEQ ID NO: 30. In some embodiments the RGM-A:ALK5 heteromultimer comprises a polypeptide that is at least 70%, 75%, 80%, 85%, 90%, 91%, 92%, 93%, 94%, 95%, 95%, 96%, 97%, 98%, 99%, or 100% identical to a polypeptide that begins at any one of amino acids of 25-36 of SEQ ID NO: 87 and ends at any one of amino acids 101-130 of SEQ ID NO: 87. In certain preferred embodiments, RGM-A:ALK5 heteromultimers are soluble. In some embodiments, a RGM-A:ALK5 heteromultimer of the disclosure binds to one or more TGF-beta superfamily ligands (e.g., binds to one or more TGF-beta superfamily ligands with a K_{D} of at least 1×10⁻⁷). In some embodiments, a RGM-A:ALK5 heteromultimer of the disclosure inhibits one or more TGF-beta superfamily ligands (e.g., inhibits Smad signaling). Heteromultimer-ligand binding and inhibition may be determined using a variety of assays including, for example, those described herein (e.g., in vitro binding and/or cell-based signaling assays). In some embodiments, a RGM-A:ALK5 heteromultimer of the disclosure has a different TGF-beta ligand binding and/or inhibition profile (specificity) compared to a corresponding homomultimer (e.g., RGM-A and ALK5 homomultimers). In some embodiments, a RGM-A:ALK5 heteromultimer of the disclosure is a heterodimer.

[0074] In certain aspects, the disclosure relates to heteromultimers that comprise at least one RGM-A polypeptide, which includes fragments, functional variants, and modified forms thereof, and at least one ALK6 polypeptide, which includes fragments, functional variants, and modified forms thereof. In some embodiments, the RGM-A:ALK6 heteromultimer comprises a polypeptide that is at least 70%, 75%, 80%, 85%, 90%, 91%, 92%, 93%, 94%, 95%, 95%, 96%, 97%, 98%, 99%, or 100% identical to the amino acid sequence of any one of SEQ ID NOs: 553 or 554. In some embodiments, the RGM-A:ALK6 heteromultimer comprises a polypeptide that is at least 70%, 75%, 80%, 85%, 90%, 91%, 92%, 93%, 94%, 95%, 95%, 96%, 97%, 98%, 99%, or 100% identical to a polypeptide that begins at any one of amino acids of 1-177 of SEQ ID NO: 561 and ends at any one of amino acids 430-458 of SEQ ID NO: 561. In some embodiments, the RGM-A:ALK6 heteromultimer comprises a polypeptide that is at least 70%, 75%, 80%, 85%, 90%, 91%, 92%, 93%, 94%, 95%, 95%, 96%, 97%, 98%, 99%, or 100% identical to a polypeptide that begins at any one of amino acids of 1-153 of SEQ ID NO: 565 and ends at any one of amino acids 406-434 of SEQ ID NO: 565. In some embodiments, the RGM-A:ALK6 heteromultimer comprises a polypeptide that is at least 70%, 75%, 80%, 85%, 90%, 91%, 92%, 93%, 94%, 95%, 95%, 96%, 97%, 98%, 99%, or 100% identical to a polypeptide that begins at any one of amino acids of 1-169 of SEQ ID NO: 569 and ends at any one of amino acids 422-450 of SEQ ID NO: 569. In some embodiments, the RGM-A:ALK6 heteromultimer comprises a polypeptide that is at least 70%, 75%, 80%, 85%, 90%, 91%, 92%, 93%, 94%, 95%, 95%, 96%, 97%, 98%, 99%, or 100% identical to the amino acid sequence of any one of SEQ ID NOs: 553 or 554. In some embodiments, the RGM-A:ALK6 heteromultimer comprises a polypeptide that is at least 70%, 75%, 80%, 85%, 90%, 91%, 92%, 93%, 94%, 95%, 95%, 96%, 97%, 98%, 99%, or 100% identical to a polypeptide that begins at any one of amino acids of 1-177 of SEQ ID NO: 561 and ends at any one of amino acids 430-458 of SEQ ID NO: 561. In some embodiments, the RGM-A:ALK6 heteromultimer comprises a polypeptide that is at least 70%, 75%, 80%, 85%, 90%, 91%, 92%, 93%, 94%, 95%, 95%, 96%, 97%, 98%, 99%, or 100% identical to a polypeptide that begins at any one of amino acids of 1-153 of SEQ ID NO: 565 and ends at any one of amino acids 406-434 of SEQ ID NO: 565. In some embodiments, the RGM-A:ALK6 heteromultimer comprises a polypeptide that is at least 70%, 75%, 80%, 85%, 90%, 91%, 92%, 93%, 94%, 95%, 95%, 96%, 97%, 98%, 99%, or 100% identical to a polypeptide that begins at any one of amino acids of 1-169 of SEQ ID NO: 569 and ends at any one of amino acids 422-450 of SEQ ID NO: 569. In certain preferred embodiments, RGM-A:ALK6 heteromultimers are soluble. In some embodiments, a RGM-A:ALK6 heteromultimer of the disclosure binds to one or more TGF-beta superfamily ligands (e.g., binds to one or more TGF-beta superfamily ligands with a K_{D} of at least 1×10⁻⁷). In some embodiments, a RGM-A:ALK6 heteromultimer of the disclosure inhibits one or more TGF-beta superfamily ligands (e.g., inhibits Smad signaling). Heteromultimer-ligand binding and inhibition may be determined using a variety of assays including, for example, those described herein (e.g., in vitro binding and/or cell-based signaling assays). In some embodiments, a RGM-A:ALK6 heteromultimer of the disclosure has a different TGF-beta ligand binding and/or inhibition profile (specificity) compared to a corresponding homomultimer (e.g., RGM-A and ALK6 homomultimers). In some embodiments, a RGM-A:ALK6 heteromultimer of the disclosure is a heterodimer.

[0075] In certain aspects, the disclosure relates to heteromultimers that comprise at least one RGM-A polypeptide, which includes fragments, functional variants, and modified forms thereof, and at least one ALK7 polypeptide, which includes fragments, functional variants, and modified forms thereof. In some embodiments, the RGM-A:ALK7 heteromultimer comprises a polypeptide that is at least 70%, 75%, 80%, 85%, 90%, 91%, 92%, 93%, 94%, 95%, 95%, 96%, 97%, 98%, 99%, or 100% identical to the amino acid sequence of any one of SEQ ID NOs: 553 or 554. In some embodiments, the RGM-A:ALK7 heteromultimer comprises a polypeptide that is at least 70%, 75%, 80%, 85%, 90%, 91%, 92%, 93%, 94%, 95%, 95%, 96%, 97%, 98%, 99%, or 100% identical to a polypeptide that begins at any one of amino acids of 1-177 of SEQ ID NO: 561 and ends at any one of amino acids 430-458 of SEQ ID NO: 561. In some embodiments, the RGM-A:ALK7 heteromultimer comprises a polypeptide that is at least 70%, 75%, 80%, 85%, 90%, 91%, 92%, 93%, 94%, 95%, 95%, 96%, 97%, 98%, 99%, or 100% identical to a polypeptide that begins at any one of amino acids of 1-153 of SEQ ID NO: 565 and ends at any one of amino acids 406-434 of SEQ ID NO: 565. In some embodiments, the RGM-A:ALK7 heteromultimer comprises a polypeptide that is at least 70%, 75%, 80%, 85%, 90%, 91%, 92%, 93%, 94%, 95%, 95%, 96%, 97%, 98%, 99%, or 100% identical to a polypeptide that begins at any one of amino acids of 1-169 of SEQ ID NO: 569 and ends at any one of amino acids 422-450 of SEQ ID NO: 569. In some embodiments, the RGM-A:ALK7 heteromultimer comprises a polypeptide that is at least 70%, 75%, 80%, 85%, 90%, 91%, 92%, 93%, 94%, 95%, 95%, 96%, 97%, 98%, 99%, or 100% identical to the amino acid sequence of any one of SEQ ID NOs: SEQ ID NO: 38, 39, 301, 302, 305, 306, 309, 310, or 313. In some embodiments the RGM-A:ALK7 heteromultimer comprises a polypeptide that is at least 70%, 75%, 80%, 85%, 90%, 91%, 92%, 93%, 94%, 95%, 95%, 96%, 97%, 98%, 99%, or 100% identical to a polypeptide that begins at any one of amino acids of 21-28 of SEQ ID NO: 38 and ends at any one of amino acids 92-113 of SEQ ID NO: 38. In some embodiments the RGM-A:ALK7 heteromultimer comprises a polypeptide that is at least 70%, 75%, 80%, 85%, 90%, 91%, 92%, 93%, 94%, 95%, 95%, 96%, 97%, 98%, 99%, or 100% identical to a polypeptide that begins at any one of amino acids of 1-13 of SEQ ID NO: 301 and ends at any one of amino acids 42-63 of SEQ ID NO: 301. In some embodiments the RGM-A:ALK7 heteromultimer comprises a polypeptide that is at least 70%, 75%, 80%, 85%, 90%, 91%, 92%, 93%, 94%, 95%, 95%, 96%, 97%, 98%, 99%, or 100% identical to a polypeptide that begins at any one of amino acids of 21-28 of SEQ ID NO: 305 and ends at any one of amino acids 411-413 of SEQ ID NO: 305. In some embodiments the RGM-A:ALK7 heteromultimer comprises a polypeptide that is at least 70%, 75%, 80%, 85%, 90%, 91%, 92%, 93%, 94%, 95%, 95%, 96%, 97%, 98%, 99%, or 100% identical to a polypeptide that begins at any one of amino acids of 21-28 of SEQ ID NO: 309 and ends at any one of amino acids 334-336 of SEQ ID NO: 309. In certain preferred embodiments, RGM-A:ALK7 heteromultimers are soluble. In some embodiments, a RGM-A:ALK7 heteromultimer of the disclosure binds to one or more TGF-beta superfamily ligands (e.g., binds to one or more TGF-beta superfamily ligands with a K_{D} of at least 1×10⁻⁷). In some embodiments, a RGM-A:ALK7 heteromultimer of the disclosure inhibits one or more TGF-beta superfamily ligands (e.g., inhibits Smad signaling). Heteromultimer-ligand binding and inhibition may be determined using a variety of assays including, for example, those described herein (e.g., in vitro binding and/or cell-based signaling assays). In some embodiments, a RGM-A:ALK7 heteromultimer of the disclosure has a different TGF-beta ligand binding and/or inhibition profile (specificity) compared to a corresponding homomultimer (e.g., RGM-A and ALK7 homomultimers). In some embodiments, a RGM-A:ALK7 heteromultimer of the disclosure is a heterodimer.

[0076] In certain aspects, the disclosure relates to heteromultimers that comprise at least one RGM-B polypeptide, which includes fragments, functional variants, and modified forms thereof, and at least one ALK1 polypeptide, which includes fragments, functional variants, and modified forms thereof. In some embodiments, the RGM-B:ALK1 heteromultimer comprises a polypeptide that is at least 70%, 75%, 80%, 85%, 90%, 91%, 92%, 93%, 94%, 95%, 95%, 96%, 97%, 98%, 99%, or 100% identical to the amino acid sequence of any one of SEQ ID NOs: 557 or 558. In some embodiments, the RGM-B:ALK1 heteromultimer comprises a polypeptide that is at least 70%, 75%, 80%, 85%, 90%, 91%, 92%, 93%, 94%, 95%, 95%, 96%, 97%, 98%, 99%, or 100% identical to a polypeptide that begins at any one of amino acids of 1-87 of SEQ ID NO: 557 and ends at any one of amino acids 452-478 of SEQ ID NO: 557. In some embodiments, the RGM-B:ALK1 heteromultimer comprises a polypeptide that is at least 70%, 75%, 80%, 85%, 90%, 91%, 92%, 93%, 94%, 95%, 95%, 96%, 97%, 98%, 99%, or 100% identical to a polypeptide that begins at any one of amino acids of 210-222 of SEQ ID NO: 557 and ends at any one of amino acids 413-452 of SEQ ID NO: 557. In some embodiments, the RGM-B:ALK1 heteromultimer comprises a polypeptide that is at least 70%, 75%, 80%, 85%, 90%, 91%, 92%, 93%, 94%, 95%, 95%, 96%, 97%, 98%, 99%, or 100% identical to a polypeptide that begins at any one of amino acids of 87-95 of SEQ ID NO: 557 and ends at any one of amino acids 204-209 of SEQ ID NO: 557. In some embodiments, the RGM-B:ALK1 heteromultimer comprises a RGM-B protein, wherein the RGM-B protein is a dimer comprising a first polypeptide that is at least 70%, 75%, 80%, 85%, 90%, 91%, 92%, 93%, 94%, 95%, 96%, 97%, 98%, 99%, or 100% identical to a polypeptide that begins at any one of amino acids of 87-95 of SEQ ID NO: 557 and ends at any one of amino acids 204-209 of SEQ ID NO: 557 and second polypeptide that is at least 70%, 75%, 80%, 85%, 90%, 91%, 92%, 93%, 94%, 95%, 96%, 97%, 98%, 99%, or 100% identical to a polypeptide that begins at any one of amino acids of 210-222 of SEQ ID NO: 557 and ends at any one of amino acids 413-452 of SEQ ID NO: 557. In some embodiments, the RGM-B:ALK1 heteromultimer comprises a single chain ligand trap that comprises a first RGM-B polypeptide domain that is at least 70%, 75%, 80%, 85%, 90%, 91%, 92%, 93%, 94%, 95%, 96%, 97%, 98%, 99%, or 100% identical to a polypeptide that begins at any one of amino acids of 87-95 of SEQ ID NO: 557 and ends at any one of amino acids 204-209 of SEQ ID NO: 557 and second RGM-B polypeptide domain that is at least 70%, 75%, 80%, 85%, 90%, 91%, 92%, 93%, 94%, 95%, 96%, 97%, 98%, 99%, or 100% identical to a polypeptide that begins at any one of amino acids of 210-222 of SEQ ID NO: 557 and ends at any one of amino acids 413-452 of SEQ ID NO: 557. In some embodiments, the RGM-B:ALK1 heteromultimer comprises a polypeptide that is at least 70%, 75%, 80%, 85%, 90%, 91%, 92%, 93%, 94%, 95%, 95%, 96%, 97%, 98%, 99%, or 100% identical to the amino acid sequence of any one of SEQ ID NOs: 14 or 15. In some embodiments, the RGM-B:ALK1 heteromultimer comprises a polypeptide that is at least 70%, 75%, 80%, 85%, 90%, 91%, 92%, 93%, 94%, 95%, 95%, 96%, 97%, 98%, 99%, or 100% identical to a polypeptide that begins at any one of amino acids of 22-34 of SEQ ID NO: 14 and ends at any one of amino acids 95-118 of SEQ ID NO: 14. In certain preferred embodiments, RGM-B:ALK1 heteromultimers are soluble. In some embodiments, a RGM-B:ALK1 heteromultimer of the disclosure binds to one or more TGF-beta superfamily ligands (e.g., binds to one or more TGF-beta superfamily ligands with a K_{D} of at least 1×10⁻⁷). In some embodiments, a RGM-B:ALK1 heteromultimer of the disclosure inhibits one or more TGF-beta superfamily ligands (e.g., inhibits Smad signaling). Heteromultimer-ligand binding and inhibition may be determined using a variety of assays including, for example, those described herein (e.g., in vitro binding and/or cell-based signaling assays). In some embodiments, a RGM-B:ALK1 heteromultimer of the disclosure has a different TGF-beta ligand binding and/or inhibition profile (specificity) compared to a corresponding homomultimer (e.g., RGM-B and ALK1 homomultimers). In some embodiments, a RGM-B:ALK1 heteromultimer of the disclosure is a heterodimer.

[0077] In certain aspects, the disclosure relates to heteromultimers that comprise at least one RGM-B polypeptide, which includes fragments, functional variants, and modified forms thereof, and at least one ALK2 polypeptide, which includes fragments, functional variants, and modified forms thereof. In some embodiments, the RGM-B:ALK2 heteromultimer comprises a polypeptide that is at least 70%, 75%, 80%, 85%, 90%, 91%, 92%, 93%, 94%, 95%, 95%, 96%, 97%, 98%, 99%, or 100% identical to the amino acid sequence of any one of SEQ ID NOs: 557 or 558. In some embodiments, the RGM-B:ALK2 heteromultimer comprises a polypeptide that is at least 70%, 75%, 80%, 85%, 90%, 91%, 92%, 93%, 94%, 95%, 95%, 96%, 97%, 98%, 99%, or 100% identical to a polypeptide that begins at any one of amino acids of 1-87 of SEQ ID NO: 557 and ends at any one of amino acids 452-478 of SEQ ID NO: 557. In some embodiments, the RGM-B:ALK2 heteromultimer comprises a polypeptide that is at least 70%, 75%, 80%, 85%, 90%, 91%, 92%, 93%, 94%, 95%, 95%, 96%, 97%, 98%, 99%, or 100% identical to a polypeptide that begins at any one of amino acids of 210-222 of SEQ ID NO: 557 and ends at any one of amino acids 413-452 of SEQ ID NO: 557. In some embodiments, the RGM-B:ALK2 heteromultimer comprises a polypeptide that is at least 70%, 75%, 80%, 85%, 90%, 91%, 92%, 93%, 94%, 95%, 95%, 96%, 97%, 98%, 99%, or 100% identical to a polypeptide that begins at any one of amino acids of 87-95 of SEQ ID NO: 557 and ends at any one of amino acids 204-209 of SEQ ID NO: 557. In some embodiments, the RGM-B:ALK2 heteromultimer comprises a RGM-B protein, wherein the RGM-B protein is a dimer comprising a first polypeptide that is at least 70%, 75%, 80%, 85%, 90%, 91%, 92%, 93%, 94%, 95%, 96%, 97%, 98%, 99%, or 100% identical to a polypeptide that begins at any one of amino acids of 87-95 of SEQ ID NO: 557 and ends at any one of amino acids 204-209 of SEQ ID NO: 557 and second polypeptide that is at least 70%, 75%, 80%, 85%, 90%, 91%, 92%, 93%, 94%, 95%, 96%, 97%, 98%, 99%, or 100% identical to a polypeptide that begins at any one of amino acids of 210-222 of SEQ ID NO: 557 and ends at any one of amino acids 413-452 of SEQ ID NO: 557. In some embodiments, the RGM-B:ALK2 heteromultimer comprises a single chain ligand trap that comprises a first RGM-B polypeptide domain that is at least 70%, 75%, 80%, 85%, 90%, 91%, 92%, 93%, 94%, 95%, 96%, 97%, 98%, 99%, or 100% identical to a polypeptide that begins at any one of amino acids of 87-95 of SEQ ID NO: 557 and ends at any one of amino acids 204-209 of SEQ ID NO: 557 and second RGM-B polypeptide domain that is at least 70%, 75%, 80%, 85%, 90%, 91%, 92%, 93%, 94%, 95%, 96%, 97%, 98%, 99%, or 100% identical to a polypeptide that begins at any one of amino acids of 210-222 of SEQ ID NO: 557 and ends at any one of amino acids 413-452 of SEQ ID NO: 557. In some embodiments, the RGM-B:ALK2 heteromultimer comprises a polypeptide that is at least 70%, 75%, 80%, 85%, 90%, 91%, 92%, 93%, 94%, 95%, 95%, 96%, 97%, 98%, 99%, or 100% identical to the amino acid sequence of any one of SEQ ID NOs: SEQ ID NO: 18 or 19. In some embodiments the RGM-B:ALK2 heteromultimer comprises a polypeptide that is at least 70%, 75%, 80%, 85%, 90%, 91%, 92%, 93%, 94%, 95%, 95%, 96%, 97%, 98%, 99%, or 100% identical to a polypeptide that begins at any one of amino acids of 21-35 of SEQ ID NO: 18 and ends at any one of amino acids 99-123 of SEQ ID NO: 18. In certain preferred embodiments, RGM-B:ALK2 heteromultimers are soluble. In some embodiments, a RGM-B:ALK2 heteromultimer of the disclosure binds to one or more TGF-beta superfamily ligands (e.g., binds to one or more TGF-beta superfamily ligands with a K_{D} of at least 1×10⁻⁷). In some embodiments, a RGM-B:ALK2 heteromultimer of the disclosure inhibits one or more TGF-beta superfamily ligands (e.g., inhibits Smad signaling). Heteromultimer-ligand binding and inhibition may be determined using a variety of assays including, for example, those described herein (e.g., in vitro binding and/or cell-based signaling assays). In some embodiments, a RGM-B:ALK2 heteromultimer of the disclosure has a different TGF-beta ligand binding and/or inhibition profile (specificity) compared to a corresponding homomultimer (e.g., RGM-B and ALK2 homomultimers). In some embodiments, a RGM-B:ALK2 heteromultimer of the disclosure is a heterodimer.

[0078] In certain aspects, the disclosure relates to heteromultimers that comprise at least one RGM-B polypeptide, which includes fragments, functional variants, and modified forms thereof, and at least one ALK3 polypeptide, which includes fragments, functional variants, and modified forms thereof. In some embodiments, the RGM-B:ALK3 heteromultimer comprises a polypeptide that is at least 70%, 75%, 80%, 85%, 90%, 91%, 92%, 93%, 94%, 95%, 95%, 96%, 97%, 98%, 99%, or 100% identical to the amino acid sequence of any one of SEQ ID NOs: 557 or 558. In some embodiments, the RGM-B:ALK3 heteromultimer comprises a polypeptide that is at least 70%, 75%, 80%, 85%, 90%, 91%, 92%, 93%, 94%, 95%, 95%, 96%, 97%, 98%, 99%, or 100% identical to a polypeptide that begins at any one of amino acids of 1-87 of SEQ ID NO: 557 and ends at any one of amino acids 452-478 of SEQ ID NO: 557. In some embodiments, the RGM-B:ALK3 heteromultimer comprises a polypeptide that is at least 70%, 75%, 80%, 85%, 90%, 91%, 92%, 93%, 94%, 95%, 95%, 96%, 97%, 98%, 99%, or 100% identical to a polypeptide that begins at any one of amino acids of 210-222 of SEQ ID NO: 557 and ends at any one of amino acids 413-452 of SEQ ID NO: 557. In some embodiments, the RGM-B:ALK3 heteromultimer comprises a polypeptide that is at least 70%, 75%, 80%, 85%, 90%, 91%, 92%, 93%, 94%, 95%, 95%, 96%, 97%, 98%, 99%, or 100% identical to a polypeptide that begins at any one of amino acids of 87-95 of SEQ ID NO: 557 and ends at any one of amino acids 204-209 of SEQ ID NO: 557. In some embodiments, the RGM-B:ALK3 heteromultimer comprises a RGM-B protein, wherein the RGM-B protein is a dimer comprising a first polypeptide that is at least 70%, 75%, 80%, 85%, 90%, 91%, 92%, 93%, 94%, 95%, 96%, 97%, 98%, 99%, or 100% identical to a polypeptide that begins at any one of amino acids of 87-95 of SEQ ID NO: 557 and ends at any one of amino acids 204-209 of SEQ ID NO: 557 and second polypeptide that is at least 70%, 75%, 80%, 85%, 90%, 91%, 92%, 93%, 94%, 95%, 96%, 97%, 98%, 99%, or 100% identical to a polypeptide that begins at any one of amino acids of 210-222 of SEQ ID NO: 557 and ends at any one of amino acids 413-452 of SEQ ID NO: 557. In some embodiments, the RGM-B:ALK3 heteromultimer comprises a single chain ligand trap that comprises a first RGM-B polypeptide domain that is at least 70%, 75%, 80%, 85%, 90%, 91%, 92%, 93%, 94%, 95%, 96%, 97%, 98%, 99%, or 100% identical to a polypeptide that begins at any one of amino acids of 87-95 of SEQ ID NO: 557 and ends at any one of amino acids 204-209 of SEQ ID NO: 557 and second RGM-B polypeptide domain that is at least 70%, 75%, 80%, 85%, 90%, 91%, 92%, 93%, 94%, 95%, 96%, 97%, 98%, 99%, or 100% identical to a polypeptide that begins at any one of amino acids of 210-222 of SEQ ID NO: 557 and ends at any one of amino acids 413-452 of SEQ ID NO: 557. In some embodiments, the RGM-B:ALK3 heteromultimer comprises a polypeptide that is at least 70%, 75%, 80%, 85%, 90%, 91%, 92%, 93%, 94%, 95%, 95%, 96%, 97%, 98%, 99%, or 100% identical to the amino acid sequence of any one of SEQ ID NOs: SEQ ID NO: 22 or 23. In some embodiments the RGM-B:ALK3 heteromultimer comprises a polypeptide that is at least 70%, 75%, 80%, 85%, 90%, 91%, 92%, 93%, 94%, 95%, 95%, 96%, 97%, 98%, 99%, or 100% identical to a polypeptide that begins at any one of amino acids of 24-61 of SEQ ID NO: 22 and ends at any one of amino acids 130-152 of SEQ ID NO: 22. In certain preferred embodiments, RGM-B:ALK3 heteromultimers are soluble. In some embodiments, a RGM-B:ALK3 heteromultimer of the disclosure binds to one or more TGF-beta superfamily ligands (e.g., binds to one or more TGF-beta superfamily ligands with a K_{D} of at least 1×10⁻⁷). In some embodiments, a RGM-B:ALK3 heteromultimer of the disclosure inhibits one or more TGF-beta superfamily ligands (e.g., inhibits Smad signaling). Heteromultimer-ligand binding and inhibition may be determined using a variety of assays including, for example, those described herein (e.g., in vitro binding and/or cell-based signaling assays). In some embodiments, a RGM-B:ALK3 heteromultimer of the disclosure has a different TGF-beta ligand binding and/or inhibition profile (specificity) compared to a corresponding homomultimer (e.g., RGM-B and ALK3 homomultimers). In some embodiments, a RGM-B:ALK3 heteromultimer of the disclosure is a heterodimer.

[0079] In certain aspects, the disclosure relates to heteromultimers that comprise at least one RGM-B polypeptide, which includes fragments, functional variants, and modified forms thereof, and at least one ALK4 polypeptide, which includes fragments, functional variants, and modified forms thereof. In some embodiments, the RGM-B:ALK4 heteromultimer comprises a polypeptide that is at least 70%, 75%, 80%, 85%, 90%, 91%, 92%, 93%, 94%, 95%, 95%, 96%, 97%, 98%, 99%, or 100% identical to the amino acid sequence of any one of SEQ ID NOs: 557 or 558. In some embodiments, the RGM-B:ALK4 heteromultimer comprises a polypeptide that is at least 70%, 75%, 80%, 85%, 90%, 91%, 92%, 93%, 94%, 95%, 95%, 96%, 97%, 98%, 99%, or 100% identical to a polypeptide that begins at any one of amino acids of 1-87 of SEQ ID NO: 557 and ends at any one of amino acids 452-478 of SEQ ID NO: 557. In some embodiments, the RGM-B:ALK4 heteromultimer comprises a polypeptide that is at least 70%, 75%, 80%, 85%, 90%, 91%, 92%, 93%, 94%, 95%, 95%, 96%, 97%, 98%, 99%, or 100% identical to a polypeptide that begins at any one of amino acids of 210-222 of SEQ ID NO: 557 and ends at any one of amino acids 413-452 of SEQ ID NO: 557. In some embodiments, the RGM-B:ALK4 heteromultimer comprises a polypeptide that is at least 70%, 75%, 80%, 85%, 90%, 91%, 92%, 93%, 94%, 95%, 95%, 96%, 97%, 98%, 99%, or 100% identical to a polypeptide that begins at any one of amino acids of 87-95 of SEQ ID NO: 557 and ends at any one of amino acids 204-209 of SEQ ID NO: 557. In some embodiments, the RGM-B:ALK4 heteromultimer comprises a RGM-B protein, wherein the RGM-B protein is a dimer comprising a first polypeptide that is at least 70%, 75%, 80%, 85%, 90%, 91%, 92%, 93%, 94%, 95%, 96%, 97%, 98%, 99%, or 100% identical to a polypeptide that begins at any one of amino acids of 87-95 of SEQ ID NO: 557 and ends at any one of amino acids 204-209 of SEQ ID NO: 557 and second polypeptide that is at least 70%, 75%, 80%, 85%, 90%, 91%, 92%, 93%, 94%, 95%, 96%, 97%, 98%, 99%, or 100% identical to a polypeptide that begins at any one of amino acids of 210-222 of SEQ ID NO: 557 and ends at any one of amino acids 413-452 of SEQ ID NO: 557. In some embodiments, the RGM-B:ALK4 heteromultimer comprises a single chain ligand trap that comprises a first RGM-B polypeptide domain that is at least 70%, 75%, 80%, 85%, 90%, 91%, 92%, 93%, 94%, 95%, 96%, 97%, 98%, 99%, or 100% identical to a polypeptide that begins at any one of amino acids of 87-95 of SEQ ID NO: 557 and ends at any one of amino acids 204-209 of SEQ ID NO: 557 and second RGM-B polypeptide domain that is at least 70%, 75%, 80%, 85%, 90%, 91%, 92%, 93%, 94%, 95%, 96%, 97%, 98%, 99%, or 100% identical to a polypeptide that begins at any one of amino acids of 210-222 of SEQ ID NO: 557 and ends at any one of amino acids 413-452 of SEQ ID NO: 557. In some embodiments, the RGM-B:ALK4 heteromultimer comprises a polypeptide that is at least 70%, 75%, 80%, 85%, 90%, 91%, 92%, 93%, 94%, 95%, 95%, 96%, 97%, 98%, 99%, or 100% identical to the amino acid sequence of any one of SEQ ID NOs: SEQ ID NO: 26, 27, 83, or 84. In some embodiments the RGM-B:ALK4 heteromultimer comprises a polypeptide that is at least 70%, 75%, 80%, 85%, 90%, 91%, 92%, 93%, 94%, 95%, 95%, 96%, 97%, 98%, 99%, or 100% identical to a polypeptide that begins at any one of amino acids of 24-34 of SEQ ID NO: 26 and ends at any one of amino acids 101-126 of SEQ ID NO: 26. In some embodiments the RGM-B:ALK4 heteromultimer comprises a polypeptide that is at least 70%, 75%, 80%, 85%, 90%, 91%, 92%, 93%, 94%, 95%, 95%, 96%, 97%, 98%, 99%, or 100% identical to a polypeptide that begins at any one of amino acids of 24-34 of SEQ ID NO: 83 and ends at any one of amino acids 101-126 of SEQ ID NO: 83. In certain preferred embodiments, RGM-B:ALK4 heteromultimers are soluble. In some embodiments, a RGM-B:ALK4 heteromultimer of the disclosure binds to one or more TGF-beta superfamily ligands (e.g., binds to one or more TGF-beta superfamily ligands with a K_{D} of at least 1×10⁻⁷). In some embodiments, a RGM-B:ALK4 heteromultimer of the disclosure inhibits one or more TGF-beta superfamily ligands (e.g., inhibits Smad signaling). Heteromultimer-ligand binding and inhibition may be determined using a variety of assays including, for example, those described herein (e.g., in vitro binding and/or cell-based signaling assays). In some embodiments, a RGM-B:ALK4 heteromultimer of the disclosure has a different TGF-beta ligand binding and/or inhibition profile (specificity) compared to a corresponding homomultimer (e.g., RGM-B and ALK4 homomultimers). In some embodiments, a RGM-B:ALK4 heteromultimer of the disclosure is a heterodimer.

[0080] In certain aspects, the disclosure relates to heteromultimers that comprise at least one RGM-B polypeptide, which includes fragments, functional variants, and modified forms thereof, and at least one ALK5 polypeptide, which includes fragments, functional variants, and modified forms thereof. In some embodiments, the RGM-B:ALK5 heteromultimer comprises a polypeptide that is at least 70%, 75%, 80%, 85%, 90%, 91%, 92%, 93%, 94%, 95%, 95%, 96%, 97%, 98%, 99%, or 100% identical to the amino acid sequence of any one of SEQ ID NOs: 557 or 558. In some embodiments, the RGM-B:ALK5 heteromultimer comprises a polypeptide that is at least 70%, 75%, 80%, 85%, 90%, 91%, 92%, 93%, 94%, 95%, 95%, 96%, 97%, 98%, 99%, or 100% identical to a polypeptide that begins at any one of amino acids of 1-87 of SEQ ID NO: 557 and ends at any one of amino acids 452-478 of SEQ ID NO: 557. In some embodiments, the RGM-B:ALK5 heteromultimer comprises a polypeptide that is at least 70%, 75%, 80%, 85%, 90%, 91%, 92%, 93%, 94%, 95%, 95%, 96%, 97%, 98%, 99%, or 100% identical to a polypeptide that begins at any one of amino acids of 210-222 of SEQ ID NO: 557 and ends at any one of amino acids 413-452 of SEQ ID NO: 557. In some embodiments, the RGM-B:ALK5 heteromultimer comprises a polypeptide that is at least 70%, 75%, 80%, 85%, 90%, 91%, 92%, 93%, 94%, 95%, 95%, 96%, 97%, 98%, 99%, or 100% identical to a polypeptide that begins at any one of amino acids of 87-95 of SEQ ID NO: 557 and ends at any one of amino acids 204-209 of SEQ ID NO: 557. In some embodiments, the RGM-B:ALK5 heteromultimer comprises a RGM-B protein, wherein the RGM-B protein is a dimer comprising a first polypeptide that is at least 70%, 75%, 80%, 85%, 90%, 91%, 92%, 93%, 94%, 95%, 96%, 97%, 98%, 99%, or 100% identical to a polypeptide that begins at any one of amino acids of 87-95 of SEQ ID NO: 557 and ends at any one of amino acids 204-209 of SEQ ID NO: 557 and second polypeptide that is at least 70%, 75%, 80%, 85%, 90%, 91%, 92%, 93%, 94%, 95%, 96%, 97%, 98%, 99%, or 100% identical to a polypeptide that begins at any one of amino acids of 210-222 of SEQ ID NO: 557 and ends at any one of amino acids 413-452 of SEQ ID NO: 557. In some embodiments, the RGM-B:ALK5 heteromultimer comprises a single chain ligand trap that comprises a first RGM-B polypeptide domain that is at least 70%, 75%, 80%, 85%, 90%, 91%, 92%, 93%, 94%, 95%, 96%, 97%, 98%, 99%, or 100% identical to a polypeptide that begins at any one of amino acids of 87-95 of SEQ ID NO: 557 and ends at any one of amino acids 204-209 of SEQ ID NO: 557 and second RGM-B polypeptide domain that is at least 70%, 75%, 80%, 85%, 90%, 91%, 92%, 93%, 94%, 95%, 96%, 97%, 98%, 99%, or 100% identical to a polypeptide that begins at any one of amino acids of 210-222 of SEQ ID NO: 557 and ends at any one of amino acids 413-452 of SEQ ID NO: 557. In some embodiments, the RGM-B:ALK5 heteromultimer comprises a polypeptide that is at least 70%, 75%, 80%, 85%, 90%, 91%, 92%, 93%, 94%, 95%, 95%, 96%, 97%, 98%, 99%, or 100% identical to the amino acid sequence of any one of SEQ ID NOs: SEQ ID NO: 30, 31, 87, or 88. In some embodiments the RGM-B:ALK5 heteromultimer comprises a polypeptide that is at least 70%, 75%, 80%, 85%, 90%, 91%, 92%, 93%, 94%, 95%, 95%, 96%, 97%, 98%, 99%, or 100% identical to a polypeptide that begins at any one of amino acids of 25-36 of SEQ ID NO: 30 and ends at any one of amino acids 101-126 of SEQ ID NO: 30. In some embodiments the RGM-B:ALK5 heteromultimer comprises a polypeptide that is at least 70%, 75%, 80%, 85%, 90%, 91%, 92%, 93%, 94%, 95%, 95%, 96%, 97%, 98%, 99%, or 100% identical to a polypeptide that begins at any one of amino acids of 25-36 of SEQ ID NO: 87 and ends at any one of amino acids 101-130 of SEQ ID NO: 87. In certain preferred embodiments, RGM-B:ALK5 heteromultimers are soluble. In some embodiments, a RGM-B:ALK5 heteromultimer of the disclosure binds to one or more TGF-beta superfamily ligands (e.g., binds to one or more TGF-beta superfamily ligands with a K_{D} of at least 1×10⁻⁷). In some embodiments, a RGM-B:ALK5 heteromultimer of the disclosure inhibits one or more TGF-beta superfamily ligands (e.g., inhibits Smad signaling). Heteromultimer-ligand binding and inhibition may be determined using a variety of assays including, for example, those described herein (e.g., in vitro binding and/or cell-based signaling assays). In some embodiments, a RGM-B:ALK5 heteromultimer of the disclosure has a different TGF-beta ligand binding and/or inhibition profile (specificity) compared to a corresponding homomultimer (e.g., RGM-B and ALK5 homomultimers). In some embodiments, a RGM-B:ALK5 heteromultimer of the disclosure is a heterodimer.

[0081] In certain aspects, the disclosure relates to heteromultimers that comprise at least one RGM-B polypeptide, which includes fragments, functional variants, and modified forms thereof, and at least one ALK6 polypeptide, which includes fragments, functional variants, and modified forms thereof. In some embodiments, the RGM-B:ALK6 heteromultimer comprises a polypeptide that is at least 70%, 75%, 80%, 85%, 90%, 91%, 92%, 93%, 94%, 95%, 95%, 96%, 97%, 98%, 99%, or 100% identical to the amino acid sequence of any one of SEQ ID NOs: 557 or 558. In some embodiments, the RGM-B:ALK6 heteromultimer comprises a polypeptide that is at least 70%, 75%, 80%, 85%, 90%, 91%, 92%, 93%, 94%, 95%, 95%, 96%, 97%, 98%, 99%, or 100% identical to a polypeptide that begins at any one of amino acids of 1-87 of SEQ ID NO: 557 and ends at any one of amino acids 452-478 of SEQ ID NO: 557. In some embodiments, the RGM-B:ALK6 heteromultimer comprises a polypeptide that is at least 70%, 75%, 80%, 85%, 90%, 91%, 92%, 93%, 94%, 95%, 95%, 96%, 97%, 98%, 99%, or 100% identical to a polypeptide that begins at any one of amino acids of 210-222 of SEQ ID NO: 557 and ends at any one of amino acids 413-452 of SEQ ID NO: 557. In some embodiments, the RGM-B:ALK6 heteromultimer comprises a polypeptide that is at least 70%, 75%, 80%, 85%, 90%, 91%, 92%, 93%, 94%, 95%, 95%, 96%, 97%, 98%, 99%, or 100% identical to a polypeptide that begins at any one of amino acids of 87-95 of SEQ ID NO: 557 and ends at any one of amino acids 204-209 of SEQ ID NO: 557. In some embodiments, the RGM-B:ALK6 heteromultimer comprises a RGM-B protein, wherein the RGM-B protein is a dimer comprising a first polypeptide that is at least 70%, 75%, 80%, 85%, 90%, 91%, 92%, 93%, 94%, 95%, 96%, 97%, 98%, 99%, or 100% identical to a polypeptide that begins at any one of amino acids of 87-95 of SEQ ID NO: 557 and ends at any one of amino acids 204-209 of SEQ ID NO: 557 and second polypeptide that is at least 70%, 75%, 80%, 85%, 90%, 91%, 92%, 93%, 94%, 95%, 96%, 97%, 98%, 99%, or 100% identical to a polypeptide that begins at any one of amino acids of 210-222 of SEQ ID NO: 557 and ends at any one of amino acids 413-452 of SEQ ID NO: 557. In some embodiments, the RGM-B:ALK6 heteromultimer comprises a single chain ligand trap that comprises a first RGM-B polypeptide domain that is at least 70%, 75%, 80%, 85%, 90%, 91%, 92%, 93%, 94%, 95%, 96%, 97%, 98%, 99%, or 100% identical to a polypeptide that begins at any one of amino acids of 87-95 of SEQ ID NO: 557 and ends at any one of amino acids 204-209 of SEQ ID NO: 557 and second RGM-B polypeptide domain that is at least 70%, 75%, 80%, 85%, 90%, 91%, 92%, 93%, 94%, 95%, 96%, 97%, 98%, 99%, or 100% identical to a polypeptide that begins at any one of amino acids of 210-222 of SEQ ID NO: 557 and ends at any one of amino acids 413-452 of SEQ ID NO: 557. In some embodiments, the RGM-B:ALK6 heteromultimer comprises a polypeptide that is at least 70%, 75%, 80%, 85%, 90%, 91%, 92%, 93%, 94%, 95%, 95%, 96%, 97%, 98%, 99%, or 100% identical to the amino acid sequence of any one of SEQ ID NOs: SEQ ID NO: 34, 35, 91, or 92. In some embodiments the RGM-B:ALK6 heteromultimer comprises a polypeptide that is at least 70%, 75%, 80%, 85%, 90%, 91%, 92%, 93%, 94%, 95%, 95%, 96%, 97%, 98%, 99%, or 100% identical to a polypeptide that begins at any one of amino acids of 14-32 of SEQ ID NO: 34 and ends at any one of amino acids 102-126 of SEQ ID NO: 34. In some embodiments the RGM-B:ALK6 heteromultimer comprises a polypeptide that is at least 70%, 75%, 80%, 85%, 90%, 91%, 92%, 93%, 94%, 95%, 95%, 96%, 97%, 98%, 99%, or 100% identical to a polypeptide that begins at any one of amino acids of 26-62 of SEQ ID NO: 91 and ends at any one of amino acids 132-156 of SEQ ID NO: 91. In certain preferred embodiments, RGM-B:ALK6 heteromultimers are soluble. In some embodiments, a RGM-B:ALK6 heteromultimer of the disclosure binds to one or more TGF-beta superfamily ligands (e.g., binds to one or more TGF-beta superfamily ligands with a K_{D} of at least 1×10⁻⁷). In some embodiments, a RGM-B:ALK6 heteromultimer of the disclosure inhibits one or more TGF-beta superfamily ligands (e.g., inhibits Smad signaling). Heteromultimer-ligand binding and inhibition may be determined using a variety of assays including, for example, those described herein (e.g., in vitro binding and/or cell-based signaling assays). In some embodiments, a RGM-B:ALK6 heteromultimer of the disclosure has a different TGF-beta ligand binding and/or inhibition profile (specificity) compared to a corresponding homomultimer (e.g., RGM-B and ALK6 homomultimers). In some embodiments, a RGM-B:ALK6 heteromultimer of the disclosure is a heterodimer.

[0082] In certain aspects, the disclosure relates to heteromultimers that comprise at least one RGM-B polypeptide, which includes fragments, functional variants, and modified forms thereof, and at least one ALK7 polypeptide, which includes fragments, functional variants, and modified forms thereof. In some embodiments, the RGM-B:ALK7 heteromultimer comprises a polypeptide that is at least 70%, 75%, 80%, 85%, 90%, 91%, 92%, 93%, 94%, 95%, 95%, 96%, 97%, 98%, 99%, or 100% identical to the amino acid sequence of any one of SEQ ID NOs: 557 or 558. In some embodiments, the RGM-B:ALK7 heteromultimer comprises a polypeptide that is at least 70%, 75%, 80%, 85%, 90%, 91%, 92%, 93%, 94%, 95%, 95%, 96%, 97%, 98%, 99%, or 100% identical to a polypeptide that begins at any one of amino acids of 1-87 of SEQ ID NO: 557 and ends at any one of amino acids 452-478 of SEQ ID NO: 557. In some embodiments, the RGM-B:ALK7 heteromultimer comprises a polypeptide that is at least 70%, 75%, 80%, 85%, 90%, 91%, 92%, 93%, 94%, 95%, 95%, 96%, 97%, 98%, 99%, or 100% identical to a polypeptide that begins at any one of amino acids of 210-222 of SEQ ID NO: 557 and ends at any one of amino acids 413-452 of SEQ ID NO: 557. In some embodiments, the RGM-B:ALK7 heteromultimer comprises a polypeptide that is at least 70%, 75%, 80%, 85%, 90%, 91%, 92%, 93%, 94%, 95%, 95%, 96%, 97%, 98%, 99%, or 100% identical to a polypeptide that begins at any one of amino acids of 87-95 of SEQ ID NO: 557 and ends at any one of amino acids 204-209 of SEQ ID NO: 557. In some embodiments, the RGM-B:ALK7 heteromultimer comprises a RGM-B protein, wherein the RGM-B protein is a dimer comprising a first polypeptide that is at least 70%, 75%, 80%, 85%, 90%, 91%, 92%, 93%, 94%, 95%, 96%, 97%, 98%, 99%, or 100% identical to a polypeptide that begins at any one of amino acids of 87-95 of SEQ ID NO: 557 and ends at any one of amino acids 204-209 of SEQ ID NO: 557 and second polypeptide that is at least 70%, 75%, 80%, 85%, 90%, 91%, 92%, 93%, 94%, 95%, 96%, 97%, 98%, 99%, or 100% identical to a polypeptide that begins at any one of amino acids of 210-222 of SEQ ID NO: 557 and ends at any one of amino acids 413-452 of SEQ ID NO: 557. In some embodiments, the RGM-B:ALK7 heteromultimer comprises a single chain ligand trap that comprises a first RGM-B polypeptide domain that is at least 70%, 75%, 80%, 85%, 90%, 91%, 92%, 93%, 94%, 95%, 96%, 97%, 98%, 99%, or 100% identical to a polypeptide that begins at any one of amino acids of 87-95 of SEQ ID NO: 557 and ends at any one of amino acids 204-209 of SEQ ID NO: 557 and second RGM-B polypeptide domain that is at least 70%, 75%, 80%, 85%, 90%, 91%, 92%, 93%, 94%, 95%, 96%, 97%, 98%, 99%, or 100% identical to a polypeptide that begins at any one of amino acids of 210-222 of SEQ ID NO: 557 and ends at any one of amino acids 413-452 of SEQ ID NO: 557. In some embodiments, the RGM-B:ALK7 heteromultimer comprises a polypeptide that is at least 70%, 75%, 80%, 85%, 90%, 91%, 92%, 93%, 94%, 95%, 95%, 96%, 97%, 98%, 99%, or 100% identical to the amino acid sequence of any one of SEQ ID NOs: SEQ ID NO: 38, 39, 301, 302, 305, 306, 309, 310, or 313. In some embodiments the RGM-B:ALK7 heteromultimer comprises a polypeptide that is at least 70%, 75%, 80%, 85%, 90%, 91%, 92%, 93%, 94%, 95%, 95%, 96%, 97%, 98%, 99%, or 100% identical to a polypeptide that begins at any one of amino acids of 21-28 of SEQ ID NO: 38 and ends at any one of amino acids 92-113 of SEQ ID NO: 38. In some embodiments the RGM-B:ALK7 heteromultimer comprises a polypeptide that is at least 70%, 75%, 80%, 85%, 90%, 91%, 92%, 93%, 94%, 95%, 95%, 96%, 97%, 98%, 99%, or 100% identical to a polypeptide that begins at any one of amino acids of 1-13 of SEQ ID NO: 301 and ends at any one of amino acids 42-63 of SEQ ID NO: 301. In some embodiments the RGM-B:ALK7 heteromultimer comprises a polypeptide that is at least 70%, 75%, 80%, 85%, 90%, 91%, 92%, 93%, 94%, 95%, 95%, 96%, 97%, 98%, 99%, or 100% identical to a polypeptide that begins at any one of amino acids of 21-28 of SEQ ID NO: 305 and ends at any one of amino acids 411-413 of SEQ ID NO: 305. In some embodiments the RGM-B:ALK7 heteromultimer comprises a polypeptide that is at least 70%, 75%, 80%, 85%, 90%, 91%, 92%, 93%, 94%, 95%, 95%, 96%, 97%, 98%, 99%, or 100% identical to a polypeptide that begins at any one of amino acids of 21-28 of SEQ ID NO: 309 and ends at any one of amino acids 334-336 of SEQ ID NO: 309. In certain preferred embodiments, RGM-B:ALK7 heteromultimers are soluble. In some embodiments, a RGM-B:ALK7 heteromultimer of the disclosure binds to one or more TGF-beta superfamily ligands (e.g., binds to one or more TGF-beta superfamily ligands with a K_{D} of at least 1×10⁻⁷). In some embodiments, a RGM-B:ALK7 heteromultimer of the disclosure inhibits one or more TGF-beta superfamily ligands (e.g., inhibits Smad signaling). Heteromultimer-ligand binding and inhibition may be determined using a variety of assays including, for example, those described herein (e.g., in vitro binding and/or cell-based signaling assays). In some embodiments, a RGM-B:ALK7 heteromultimer of the disclosure has a different TGF-beta ligand binding and/or inhibition profile (specificity) compared to a corresponding homomultimer (e.g., RGM-B and ALK7 homomultimers). In some embodiments, a RGM-B:ALK7 heteromultimer of the disclosure is a heterodimer.

[0083] In certain aspects, the disclosure relates to heteromultimers that comprise at least one hemojuvelin polypeptide, which includes fragments, functional variants, and modified forms thereof, and at least one ALK1 polypeptide, which includes fragments, functional variants, and modified forms thereof. In some embodiments, the hemojuvelin:ALK1 heteromultimer comprises a polypeptide that is at least 70%, 75%, 80%, 85%, 90%, 91%, 92%, 93%, 94%, 95%, 95%, 96%, 97%, 98%, 99%, or 100% identical to the amino acid sequence of any one of SEQ ID NOs: 573, 574, 577, 578, 581, or 582. In some embodiments, the hemojuvelin:ALK1 heteromultimer comprises a polypeptide that is at least 70%, 75%, 80%, 85%, 90%, 91%, 92%, 93%, 94%, 95%, 95%, 96%, 97%, 98%, 99%, or 100% identical to a polypeptide that begins at any one of amino acids of 1-36 of SEQ ID NO: 573 and ends at any one of amino acids 400-426 of SEQ ID NO: 573. In some embodiments, the hemojuvelin:ALK1 heteromultimer comprises a polypeptide that is at least 70%, 75%, 80%, 85%, 90%, 91%, 92%, 93%, 94%, 95%, 95%, 96%, 97%, 98%, 99%, or 100% identical to a polypeptide that begins at any one of amino acids of 36-42 of SEQ ID NO: 573 and ends at any one of amino acids 167-172 of SEQ ID NO: 573. In some embodiments, the hemojuvelin:ALK1 heteromultimer comprises a polypeptide that is at least 70%, 75%, 80%, 85%, 90%, 91%, 92%, 93%, 94%, 95%, 95%, 96%, 97%, 98%, 99%, or 100% identical to a polypeptide that begins at any one of amino acids of 173-185 of SEQ ID NO: 573 and ends at any one of amino acids 361-400 of SEQ ID NO: 573. In some embodiments, the hemojuvelin:ALK1 heteromultimer comprises a hemojuvelin protein that is a dimer comprising a first polypeptide that is at least 70%, 75%, 80%, 85%, 90%, 91%, 92%, 93%, 94%, 95%, 96%, 97%, 98%, 99%, or 100% identical to a polypeptide that begins at any one of amino acids of 36-42 of SEQ ID NO: 573, and ends at any one of amino acids 167-172 of SEQ ID NO: 573 and second polypeptide that is at least 70%, 75%, 80%, 85%, 90%, 91%, 92%, 93%, 94%, 95%, 96%, 97%, 98%, 99%, or 100% identical to a polypeptide that begins at any one of amino acids of 173-185 of SEQ ID NO: 573 and ends at any one of amino acids 361-400 of SEQ ID NO: 573. In some embodiments, the hemojuvelin:ALK1 heteromultimer comprises a single chain ligand trap that comprises a first hemojuvelin polypeptide domain that is at least 70%, 75%, 80%, 85%, 90%, 91%, 92%, 93%, 94%, 95%, 96%, 97%, 98%, 99%, or 100% identical to a polypeptide that begins at any one of amino acids of 36-42 of SEQ ID NO: 573 and ends at any one of amino acids 167-172 of SEQ ID NO: 573 and second hemojuvelin polypeptide domain that is at least 70%, 75%, 80%, 85%, 90%, 91%, 92%, 93%, 94%, 95%, 96%, 97%, 98%, 99%, or 100% identical to a polypeptide that begins at any one of amino acids of 173-185 of SEQ ID NO: 573 and ends at any one of amino acids 361-400 of SEQ ID NO: 573. In some embodiments, the hemojuvelin:ALK1 heteromultimer comprises a polypeptide that is at least 70%, 75%, 80%, 85%, 90%, 91%, 92%, 93%, 94%, 95%, 95%, 96%, 97%, 98%, 99%, or 100% identical to a polypeptide that begins at any one of amino acids of 1-6 of SEQ ID NO: 577 and ends at any one of amino acids 287-313 of SEQ ID NO: 577. In some embodiments, the hemojuvelin:ALK1 heteromultimer comprises a polypeptide that is at least 70%, 75%, 80%, 85%, 90%, 91%, 92%, 93%, 94%, 95%, 95%, 96%, 97%, 98%, 99%, or 100% identical to a polypeptide that begins at any one of amino acids of 1-6 of SEQ ID NO: 577 and ends at any one of amino acids 54-59 of SEQ ID NO: 577. In some embodiments, the hemojuvelin:ALK1 heteromultimer comprises a polypeptide that is at least 70%, 75%, 80%, 85%, 90%, 91%, 92%, 93%, 94%, 95%, 95%, 96%, 97%, 98%, 99%, or 100% identical to a polypeptide that begins at any one of amino acids of 60-72 of SEQ ID NO: 577 and ends at any one of amino acids 248-287 of SEQ ID NO: 577. In some embodiments, the hemojuvelin:ALK1 heteromultimer comprises a hemojuvelin protein, wherein the hemojuvelin protein is a dimer comprising a first polypeptide that is at least 70%, 75%, 80%, 85%, 90%, 91%, 92%, 93%, 94%, 95%, 96%, 97%, 98%, 99%, or 100% identical to a polypeptide that begins at any one of amino acids of 1-6 of SEQ ID NO: 577 and ends at any one of amino acids 54-59 of SEQ ID NO: 577, and second polypeptide that is at least 70%, 75%, 80%, 85%, 90%, 91%, 92%, 93%, 94%, 95%, 96%, 97%, 98%, 99%, or 100% identical to a polypeptide that begins at any one of amino acids of 60-72 of SEQ ID NO: 577 and ends at any one of amino acids 248-287 of SEQ ID NO: 577. In some embodiments, the hemojuvelin:ALK1 heteromultimer comprises a single chain ligand trap that comprises a first hemojuvelin polypeptide domain that is at least 70%, 75%, 80%, 85%, 90%, 91%, 92%, 93%, 94%, 95%, 96%, 97%, 98%, 99%, or 100% identical to a polypeptide that begins at any one of amino acids of 1-6 of SEQ ID NO: 577 and ends at any one of amino acids 54-59 of SEQ ID NO: 577, and second hemojuvelin polypeptide domain that is at least 70%, 75%, 80%, 85%, 90%, 91%, 92%, 93%, 94%, 95%, 96%, 97%, 98%, 99%, or 100% identical to a polypeptide that begins at any one of amino acids of 60-72 of SEQ ID NO: 577, and ends at any one of amino acids 248-287 of SEQ ID NO: 577. In some embodiments, the hemojuvelin:ALK1 heteromultimer comprises a polypeptide that is at least 70%, 75%, 80%, 85%, 90%, 91%, 92%, 93%, 94%, 95%, 95%, 96%, 97%, 98%, 99%, or 100% identical to a polypeptide that begins at any one of amino acids of 1-4 of SEQ ID NO: 581 and ends at any one of amino acids 135-200 of SEQ ID NO: 581. In some embodiments, the hemojuvelin:ALK1 heteromultimer comprises a polypeptide that is at least 70%, 75%, 80%, 85%, 90%, 91%, 92%, 93%, 94%, 95%, 95%, 96%, 97%, 98%, 99%, or 100% identical to the amino acid sequence of any one of SEQ ID NOs: 14 or 15. In some embodiments, the hemojuvelin:ALK1 heteromultimer comprises a polypeptide that is at least 70%, 75%, 80%, 85%, 90%, 91%, 92%, 93%, 94%, 95%, 95%, 96%, 97%, 98%, 99%, or 100% identical to a polypeptide that begins at any one of amino acids of 22-34 of SEQ ID NO: 14 and ends at any one of amino acids 95-118 of SEQ ID NO: 14. In certain preferred embodiments, hemojuvelin:ALK1 heteromultimers are soluble. In some embodiments, a hemojuvelin:ALK heteromultimer of the disclosure binds to one or more TGF-beta superfamily ligands (e.g., binds to one or more TGF-beta superfamily ligands with a K_{D} of at least 1×10⁻⁷). In some embodiments, a hemojuvelin:ALK1 heteromultimer of the disclosure inhibits one or more TGF-beta superfamily ligands (e.g., inhibits Smad signaling). Heteromultimer-ligand binding and inhibition may be determined using a variety of assays including, for example, those described herein (e.g., in vitro binding and/or cell-based signaling assays). In some embodiments, a hemojuvelin:ALK1 heteromultimer of the disclosure has a different TGF-beta ligand binding and/or inhibition profile (specificity) compared to a corresponding homomultimer (e.g., hemojuvelin and ALK1 homomultimers). In some embodiments, a hemojuvelin:ALK1 heteromultimer of the disclosure is a heterodimer.

[0084] In certain aspects, the disclosure relates to heteromultimers that comprise at least one hemojuvelin polypeptide, which includes fragments, functional variants, and modified forms thereof, and at least one ALK2 polypeptide, which includes fragments, functional variants, and modified forms thereof. In some embodiments, the hemojuvelin:ALK2 heteromultimer comprises a polypeptide that is at least 70%, 75%, 80%, 85%, 90%, 91%, 92%, 93%, 94%, 95%, 95%, 96%, 97%, 98%, 99%, or 100% identical to the amino acid sequence of any one of SEQ ID NOs: 573, 574, 577, 578, 581, or 582. In some embodiments, the hemojuvelin:ALK2 heteromultimer comprises a polypeptide that is at least 70%, 75%, 80%, 85%, 90%, 91%, 92%, 93%, 94%, 95%, 95%, 96%, 97%, 98%, 99%, or 100% identical to a polypeptide that begins at any one of amino acids of 1-36 of SEQ ID NO: 573 and ends at any one of amino acids 400-426 of SEQ ID NO: 573. In some embodiments, the hemojuvelin:ALK2 heteromultimer comprises a polypeptide that is at least 70%, 75%, 80%, 85%, 90%, 91%, 92%, 93%, 94%, 95%, 95%, 96%, 97%, 98%, 99%, or 100% identical to a polypeptide that begins at any one of amino acids of 36-42 of SEQ ID NO: 573 and ends at any one of amino acids 167-172 of SEQ ID NO: 573. In some embodiments, the hemojuvelin:ALK2 heteromultimer comprises a polypeptide that is at least 70%, 75%, 80%, 85%, 90%, 91%, 92%, 93%, 94%, 95%, 95%, 96%, 97%, 98%, 99%, or 100% identical to a polypeptide that begins at any one of amino acids of 173-185 of SEQ ID NO: 573 and ends at any one of amino acids 361-400 of SEQ ID NO: 573. In some embodiments, the hemojuvelin:ALK2 heteromultimer comprises a hemojuvelin protein that is a dimer comprising a first polypeptide that is at least 70%, 75%, 80%, 85%, 90%, 91%, 92%, 93%, 94%, 95%, 96%, 97%, 98%, 99%, or 100% identical to a polypeptide that begins at any one of amino acids of 36-42 of SEQ ID NO: 573, and ends at any one of amino acids 167-172 of SEQ ID NO: 573 and second polypeptide that is at least 70%, 75%, 80%, 85%, 90%, 91%, 92%, 93%, 94%, 95%, 96%, 97%, 98%, 99%, or 100% identical to a polypeptide that begins at any one of amino acids of 173-185 of SEQ ID NO: 573 and ends at any one of amino acids 361-400 of SEQ ID NO: 573. In some embodiments, the hemojuvelin:ALK2 heteromultimer comprises a single chain ligand trap that comprises a first hemojuvelin polypeptide domain that is at least 70%, 75%, 80%, 85%, 90%, 91%, 92%, 93%, 94%, 95%, 96%, 97%, 98%, 99%, or 100% identical to a polypeptide that begins at any one of amino acids of 36-42 of SEQ ID NO: 573 and ends at any one of amino acids 167-172 of SEQ ID NO: 573 and second hemojuvelin polypeptide domain that is at least 70%, 75%, 80%, 85%, 90%, 91%, 92%, 93%, 94%, 95%, 96%, 97%, 98%, 99%, or 100% identical to a polypeptide that begins at any one of amino acids of 173-185 of SEQ ID NO: 573 and ends at any one of amino acids 361-400 of SEQ ID NO: 573. In some embodiments, the hemojuvelin:ALK2 heteromultimer comprises a polypeptide that is at least 70%, 75%, 80%, 85%, 90%, 91%, 92%, 93%, 94%, 95%, 95%, 96%, 97%, 98%, 99%, or 100% identical to a polypeptide that begins at any one of amino acids of 1-6 of SEQ ID NO: 577 and ends at any one of amino acids 287-313 of SEQ ID NO: 577. In some embodiments, the hemojuvelin:ALK2 heteromultimer comprises a polypeptide that is at least 70%, 75%, 80%, 85%, 90%, 91%, 92%, 93%, 94%, 95%, 95%, 96%, 97%, 98%, 99%, or 100% identical to a polypeptide that begins at any one of amino acids of 1-6 of SEQ ID NO: 577 and ends at any one of amino acids 54-59 of SEQ ID NO: 577. In some embodiments, the hemojuvelin:ALK2 heteromultimer comprises a polypeptide that is at least 70%, 75%, 80%, 85%, 90%, 91%, 92%, 93%, 94%, 95%, 95%, 96%, 97%, 98%, 99%, or 100% identical to a polypeptide that begins at any one of amino acids of 60-72 of SEQ ID NO: 577 and ends at any one of amino acids 248-287 of SEQ ID NO: 577. In some embodiments, the hemojuvelin:ALK2 heteromultimer comprises a hemojuvelin protein, wherein the hemojuvelin protein is a dimer comprising a first polypeptide that is at least 70%, 75%, 80%, 85%, 90%, 91%, 92%, 93%, 94%, 95%, 96%, 97%, 98%, 99%, or 100% identical to a polypeptide that begins at any one of amino acids of 1-6 of SEQ ID NO: 577 and ends at any one of amino acids 54-59 of SEQ ID NO: 577, and second polypeptide that is at least 70%, 75%, 80%, 85%, 90%, 91%, 92%, 93%, 94%, 95%, 96%, 97%, 98%, 99%, or 100% identical to a polypeptide that begins at any one of amino acids of 60-72 of SEQ ID NO: 577 and ends at any one of amino acids 248-287 of SEQ ID NO: 577. In some embodiments, the hemojuvelin:ALK2 heteromultimer comprises a single chain ligand trap that comprises a first hemojuvelin polypeptide domain that is at least 70%, 75%, 80%, 85%, 90%, 91%, 92%, 93%, 94%, 95%, 96%, 97%, 98%, 99%, or 100% identical to a polypeptide that begins at any one of amino acids of 1-6 of SEQ ID NO: 577 and ends at any one of amino acids 54-59 of SEQ ID NO: 577, and second hemojuvelin polypeptide domain that is at least 70%, 75%, 80%, 85%, 90%, 91%, 92%, 93%, 94%, 95%, 96%, 97%, 98%, 99%, or 100% identical to a polypeptide that begins at any one of amino acids of 60-72 of SEQ ID NO: 577, and ends at any one of amino acids 248-287 of SEQ ID NO: 577. In some embodiments, the hemojuvelin:ALK2 heteromultimer comprises a polypeptide that is at least 70%, 75%, 80%, 85%, 90%, 91%, 92%, 93%, 94%, 95%, 95%, 96%, 97%, 98%, 99%, or 100% identical to a polypeptide that begins at any one of amino acids of 1-4 of SEQ ID NO: 581 and ends at any one of amino acids 135-200 of SEQ ID NO: 581. In some embodiments, the hemojuvelin:ALK2 heteromultimer comprises a polypeptide that is at least 70%, 75%, 80%, 85%, 90%, 91%, 92%, 93%, 94%, 95%, 95%, 96%, 97%, 98%, 99%, or 100% identical to the amino acid sequence of any one of SEQ ID NOs: SEQ ID NO: 18 or 19. In some embodiments the hemojuvelin:ALK2 heteromultimer comprises a polypeptide that is at least 70%, 75%, 80%, 85%, 90%, 91%, 92%, 93%, 94%, 95%, 95%, 96%, 97%, 98%, 99%, or 100% identical to a polypeptide that begins at any one of amino acids of 21-35 of SEQ ID NO: 18 and ends at any one of amino acids 99-123 of SEQ ID NO: 18. In certain preferred embodiments, hemojuvelin:ALK2 heteromultimers are soluble. In some embodiments, a hemojuvelin:ALK2 heteromultimer of the disclosure binds to one or more TGF-beta superfamily ligands (e.g., binds to one or more TGF-beta superfamily ligands with a K_{D} of at least 1×10⁻⁷). In some embodiments, a hemojuvelin:ALK2 heteromultimer of the disclosure inhibits one or more TGF-beta superfamily ligands (e.g., inhibits Smad signaling). Heteromultimer-ligand binding and inhibition may be determined using a variety of assays including, for example, those described herein (e.g., in vitro binding and/or cell-based signaling assays). In some embodiments, a hemojuvelin:ALK2 heteromultimer of the disclosure has a different TGF-beta ligand binding and/or inhibition profile (specificity) compared to a corresponding homomultimer (e.g., hemojuvelin and ALK2 homomultimers). In some embodiments, a hemojuvelin:ALK2 heteromultimer of the disclosure is a heterodimer.

[0085] In certain aspects, the disclosure relates to heteromultimers that comprise at least one hemojuvelin polypeptide, which includes fragments, functional variants, and modified forms thereof, and at least one ALK3 polypeptide, which includes fragments, functional variants, and modified forms thereof. In some embodiments, the hemojuvelin:ALK3 heteromultimer comprises a polypeptide that is at least 70%, 75%, 80%, 85%, 90%, 91%, 92%, 93%, 94%, 95%, 95%, 96%, 97%, 98%, 99%, or 100% identical to the amino acid sequence of any one of SEQ ID NOs: 573, 574, 577, 578, 581, or 582. In some embodiments, the hemojuvelin:ALK3 heteromultimer comprises a polypeptide that is at least 70%, 75%, 80%, 85%, 90%, 91%, 92%, 93%, 94%, 95%, 95%, 96%, 97%, 98%, 99%, or 100% identical to a polypeptide that begins at any one of amino acids of 1-36 of SEQ ID NO: 573 and ends at any one of amino acids 400-426 of SEQ ID NO: 573. In some embodiments, the hemojuvelin:ALK3 heteromultimer comprises a polypeptide that is at least 70%, 75%, 80%, 85%, 90%, 91%, 92%, 93%, 94%, 95%, 95%, 96%, 97%, 98%, 99%, or 100% identical to a polypeptide that begins at any one of amino acids of 36-42 of SEQ ID NO: 573 and ends at any one of amino acids 167-172 of SEQ ID NO: 573. In some embodiments, the hemojuvelin:ALK3 heteromultimer comprises a polypeptide that is at least 70%, 75%, 80%, 85%, 90%, 91%, 92%, 93%, 94%, 95%, 95%, 96%, 97%, 98%, 99%, or 100% identical to a polypeptide that begins at any one of amino acids of 173-185 of SEQ ID NO: 573 and ends at any one of amino acids 361-400 of SEQ ID NO: 573. In some embodiments, the hemojuvelin:ALK3 heteromultimer comprises a hemojuvelin protein that is a dimer comprising a first polypeptide that is at least 70%, 75%, 80%, 85%, 90%, 91%, 92%, 93%, 94%, 95%, 96%, 97%, 98%, 99%, or 100% identical to a polypeptide that begins at any one of amino acids of 36-42 of SEQ ID NO: 573, and ends at any one of amino acids 167-172 of SEQ ID NO: 573 and second polypeptide that is at least 70%, 75%, 80%, 85%, 90%, 91%, 92%, 93%, 94%, 95%, 96%, 97%, 98%, 99%, or 100% identical to a polypeptide that begins at any one of amino acids of 173-185 of SEQ ID NO: 573 and ends at any one of amino acids 361-400 of SEQ ID NO: 573. In some embodiments, the hemojuvelin:ALK3 heteromultimer comprises a single chain ligand trap that comprises a first hemojuvelin polypeptide domain that is at least 70%, 75%, 80%, 85%, 90%, 91%, 92%, 93%, 94%, 95%, 96%, 97%, 98%, 99%, or 100% identical to a polypeptide that begins at any one of amino acids of 36-42 of SEQ ID NO: 573 and ends at any one of amino acids 167-172 of SEQ ID NO: 573 and second hemojuvelin polypeptide domain that is at least 70%, 75%, 80%, 85%, 90%, 91%, 92%, 93%, 94%, 95%, 96%, 97%, 98%, 99%, or 100% identical to a polypeptide that begins at any one of amino acids of 173-185 of SEQ ID NO: 573 and ends at any one of amino acids 361-400 of SEQ ID NO: 573. In some embodiments, the hemojuvelin:ALK3 heteromultimer comprises a polypeptide that is at least 70%, 75%, 80%, 85%, 90%, 91%, 92%, 93%, 94%, 95%, 95%, 96%, 97%, 98%, 99%, or 100% identical to a polypeptide that begins at any one of amino acids of 1-6 of SEQ ID NO: 577 and ends at any one of amino acids 287-313 of SEQ ID NO: 577. In some embodiments, the hemojuvelin:ALK3 heteromultimer comprises a polypeptide that is at least 70%, 75%, 80%, 85%, 90%, 91%, 92%, 93%, 94%, 95%, 95%, 96%, 97%, 98%, 99%, or 100% identical to a polypeptide that begins at any one of amino acids of 1-6 of SEQ ID NO: 577 and ends at any one of amino acids 54-59 of SEQ ID NO: 577. In some embodiments, the hemojuvelin:ALK3 heteromultimer comprises a polypeptide that is at least 70%, 75%, 80%, 85%, 90%, 91%, 92%, 93%, 94%, 95%, 95%, 96%, 97%, 98%, 99%, or 100% identical to a polypeptide that begins at any one of amino acids of 60-72 of SEQ ID NO: 577 and ends at any one of amino acids 248-287 of SEQ ID NO: 577. In some embodiments, the hemojuvelin:ALK3 heteromultimer comprises a hemojuvelin protein, wherein the hemojuvelin protein is a dimer comprising a first polypeptide that is at least 70%, 75%, 80%, 85%, 90%, 91%, 92%, 93%, 94%, 95%, 96%, 97%, 98%, 99%, or 100% identical to a polypeptide that begins at any one of amino acids of 1-6 of SEQ ID NO: 577 and ends at any one of amino acids 54-59 of SEQ ID NO: 577, and second polypeptide that is at least 70%, 75%, 80%, 85%, 90%, 91%, 92%, 93%, 94%, 95%, 96%, 97%, 98%, 99%, or 100% identical to a polypeptide that begins at any one of amino acids of 60-72 of SEQ ID NO: 577 and ends at any one of amino acids 248-287 of SEQ ID NO: 577. In some embodiments, the hemojuvelin:ALK3 heteromultimer comprises a single chain ligand trap that comprises a first hemojuvelin polypeptide domain that is at least 70%, 75%, 80%, 85%, 90%, 91%, 92%, 93%, 94%, 95%, 96%, 97%, 98%, 99%, or 100% identical to a polypeptide that begins at any one of amino acids of 1-6 of SEQ ID NO: 577 and ends at any one of amino acids 54-59 of SEQ ID NO: 577, and second hemojuvelin polypeptide domain that is at least 70%, 75%, 80%, 85%, 90%, 91%, 92%, 93%, 94%, 95%, 96%, 97%, 98%, 99%, or 100% identical to a polypeptide that begins at any one of amino acids of 60-72 of SEQ ID NO: 577, and ends at any one of amino acids 248-287 of SEQ ID NO: 577. In some embodiments, the hemojuvelin:ALK3 heteromultimer comprises a polypeptide that is at least 70%, 75%, 80%, 85%, 90%, 91%, 92%, 93%, 94%, 95%, 95%, 96%, 97%, 98%, 99%, or 100% identical to a polypeptide that begins at any one of amino acids of 1-4 of SEQ ID NO: 581 and ends at any one of amino acids 135-200 of SEQ ID NO: 581. In some embodiments, the hemojuvelin:ALK3 heteromultimer comprises a polypeptide that is at least 70%, 75%, 80%, 85%, 90%, 91%, 92%, 93%, 94%, 95%, 95%, 96%, 97%, 98%, 99%, or 100% identical to the amino acid sequence of any one of SEQ ID NOs: SEQ ID NO: 22 or 23. In some embodiments the hemojuvelin:ALK3 heteromultimer comprises a polypeptide that is at least 70%, 75%, 80%, 85%, 90%, 91%, 92%, 93%, 94%, 95%, 95%, 96%, 97%, 98%, 99%, or 100% identical to a polypeptide that begins at any one of amino acids of 24-61 of SEQ ID NO: 22 and ends at any one of amino acids 130-152 of SEQ ID NO: 22. In certain preferred embodiments, hemojuvelin:ALK3 heteromultimers are soluble. In some embodiments, a hemojuvelin:ALK3 heteromultimer of the disclosure binds to one or more TGF-beta superfamily ligands (e.g., binds to one or more TGF-beta superfamily ligands with a K_{D} of at least 1×10⁻⁷). In some embodiments, a hemojuvelin:ALK3 heteromultimer of the disclosure inhibits one or more TGF-beta superfamily ligands (e.g., inhibits Smad signaling). Heteromultimer-ligand binding and inhibition may be determined using a variety of assays including, for example, those described herein (e.g., in vitro binding and/or cell-based signaling assays). In some embodiments, a hemojuvelin:ALK3 heteromultimer of the disclosure has a different TGF-beta ligand binding and/or inhibition profile (specificity) compared to a corresponding homomultimer (e.g., hemojuvelin and ALK3 homomultimers). In some embodiments, a hemojuvelin:ALK3 heteromultimer of the disclosure is a heterodimer.

[0086] In certain aspects, the disclosure relates to heteromultimers that comprise at least one hemojuvelin polypeptide, which includes fragments, functional variants, and modified forms thereof, and at least one ALK4 polypeptide, which includes fragments, functional variants, and modified forms thereof. In some embodiments, the hemojuvelin:ALK4 heteromultimer comprises a polypeptide that is at least 70%, 75%, 80%, 85%, 90%, 91%, 92%, 93%, 94%, 95%, 95%, 96%, 97%, 98%, 99%, or 100% identical to the amino acid sequence of any one of SEQ ID NOs: 573, 574, 577, 578, 581, or 582. In some embodiments, the hemojuvelin:ALK4 heteromultimer comprises a polypeptide that is at least 70%, 75%, 80%, 85%, 90%, 91%, 92%, 93%, 94%, 95%, 95%, 96%, 97%, 98%, 99%, or 100% identical to a polypeptide that begins at any one of amino acids of 1-36 of SEQ ID NO: 573 and ends at any one of amino acids 400-426 of SEQ ID NO: 573. In some embodiments, the hemojuvelin:ALK4 heteromultimer comprises a polypeptide that is at least 70%, 75%, 80%, 85%, 90%, 91%, 92%, 93%, 94%, 95%, 95%, 96%, 97%, 98%, 99%, or 100% identical to a polypeptide that begins at any one of amino acids of 36-42 of SEQ ID NO: 573 and ends at any one of amino acids 167-172 of SEQ ID NO: 573. In some embodiments, the hemojuvelin:ALK4 heteromultimer comprises a polypeptide that is at least 70%, 75%, 80%, 85%, 90%, 91%, 92%, 93%, 94%, 95%, 95%, 96%, 97%, 98%, 99%, or 100% identical to a polypeptide that begins at any one of amino acids of 173-185 of SEQ ID NO: 573 and ends at any one of amino acids 361-400 of SEQ ID NO: 573. In some embodiments, the hemojuvelin:ALK4 heteromultimer comprises a hemojuvelin protein that is a dimer comprising a first polypeptide that is at least 70%, 75%, 80%, 85%, 90%, 91%, 92%, 93%, 94%, 95%, 96%, 97%, 98%, 99%, or 100% identical to a polypeptide that begins at any one of amino acids of 36-42 of SEQ ID NO: 573, and ends at any one of amino acids 167-172 of SEQ ID NO: 573 and second polypeptide that is at least 70%, 75%, 80%, 85%, 90%, 91%, 92%, 93%, 94%, 95%, 96%, 97%, 98%, 99%, or 100% identical to a polypeptide that begins at any one of amino acids of 173-185 of SEQ ID NO: 573 and ends at any one of amino acids 361-400 of SEQ ID NO: 573. In some embodiments, the hemojuvelin:ALK4 heteromultimer comprises a single chain ligand trap that comprises a first hemojuvelin polypeptide domain that is at least 70%, 75%, 80%, 85%, 90%, 91%, 92%, 93%, 94%, 95%, 96%, 97%, 98%, 99%, or 100% identical to a polypeptide that begins at any one of amino acids of 36-42 of SEQ ID NO: 573 and ends at any one of amino acids 167-172 of SEQ ID NO: 573 and second hemojuvelin polypeptide domain that is at least 70%, 75%, 80%, 85%, 90%, 91%, 92%, 93%, 94%, 95%, 96%, 97%, 98%, 99%, or 100% identical to a polypeptide that begins at any one of amino acids of 173-185 of SEQ ID NO: 573 and ends at any one of amino acids 361-400 of SEQ ID NO: 573. In some embodiments, the hemojuvelin:ALK4 heteromultimer comprises a polypeptide that is at least 70%, 75%, 80%, 85%, 90%, 91%, 92%, 93%, 94%, 95%, 95%, 96%, 97%, 98%, 99%, or 100% identical to a polypeptide that begins at any one of amino acids of 1-6 of SEQ ID NO: 577 and ends at any one of amino acids 287-313 of SEQ ID NO: 577. In some embodiments, the hemojuvelin:ALK4 heteromultimer comprises a polypeptide that is at least 70%, 75%, 80%, 85%, 90%, 91%, 92%, 93%, 94%, 95%, 95%, 96%, 97%, 98%, 99%, or 100% identical to a polypeptide that begins at any one of amino acids of 1-6 of SEQ ID NO: 577 and ends at any one of amino acids 54-59 of SEQ ID NO: 577. In some embodiments, the hemojuvelin:ALK4 heteromultimer comprises a polypeptide that is at least 70%, 75%, 80%, 85%, 90%, 91%, 92%, 93%, 94%, 95%, 95%, 96%, 97%, 98%, 99%, or 100% identical to a polypeptide that begins at any one of amino acids of 60-72 of SEQ ID NO: 577 and ends at any one of amino acids 248-287 of SEQ ID NO: 577. In some embodiments, the hemojuvelin:ALK4 heteromultimer comprises a hemojuvelin protein, wherein the hemojuvelin protein is a dimer comprising a first polypeptide that is at least 70%, 75%, 80%, 85%, 90%, 91%, 92%, 93%, 94%, 95%, 96%, 97%, 98%, 99%, or 100% identical to a polypeptide that begins at any one of amino acids of 1-6 of SEQ ID NO: 577 and ends at any one of amino acids 54-59 of SEQ ID NO: 577, and second polypeptide that is at least 70%, 75%, 80%, 85%, 90%, 91%, 92%, 93%, 94%, 95%, 96%, 97%, 98%, 99%, or 100% identical to a polypeptide that begins at any one of amino acids of 60-72 of SEQ ID NO: 577 and ends at any one of amino acids 248-287 of SEQ ID NO: 577. In some embodiments, the hemojuvelin:ALK4 heteromultimer comprises a single chain ligand trap that comprises a first hemojuvelin polypeptide domain that is at least 70%, 75%, 80%, 85%, 90%, 91%, 92%, 93%, 94%, 95%, 96%, 97%, 98%, 99%, or 100% identical to a polypeptide that begins at any one of amino acids of 1-6 of SEQ ID NO: 577 and ends at any one of amino acids 54-59 of SEQ ID NO: 577, and second hemojuvelin polypeptide domain that is at least 70%, 75%, 80%, 85%, 90%, 91%, 92%, 93%, 94%, 95%, 96%, 97%, 98%, 99%, or 100% identical to a polypeptide that begins at any one of amino acids of 60-72 of SEQ ID NO: 577, and ends at any one of amino acids 248-287 of SEQ ID NO: 577. In some embodiments, the hemojuvelin:ALK4 heteromultimer comprises a polypeptide that is at least 70%, 75%, 80%, 85%, 90%, 91%, 92%, 93%, 94%, 95%, 95%, 96%, 97%, 98%, 99%, or 100% identical to a polypeptide that begins at any one of amino acids of 1-4 of SEQ ID NO: 581 and ends at any one of amino acids 135-200 of SEQ ID NO: 581. In some embodiments, the hemojuvelin:ALK4 heteromultimer comprises a polypeptide that is at least 70%, 75%, 80%, 85%, 90%, 91%, 92%, 93%, 94%, 95%, 95%, 96%, 97%, 98%, 99%, or 100% identical to the amino acid sequence of any one of SEQ ID NOs: SEQ ID NO: 26, 27, 83, or 84. In some embodiments the hemojuvelin:ALK4 heteromultimer comprises a polypeptide that is at least 70%, 75%, 80%, 85%, 90%, 91%, 92%, 93%, 94%, 95%, 95%, 96%, 97%, 98%, 99%, or 100% identical to a polypeptide that begins at any one of amino acids of 24-34 of SEQ ID NO: 26 and ends at any one of amino acids 101-126 of SEQ ID NO: 26. In some embodiments the hemojuvelin:ALK4 heteromultimer comprises a polypeptide that is at least 70%, 75%, 80%, 85%, 90%, 91%, 92%, 93%, 94%, 95%, 95%, 96%, 97%, 98%, 99%, or 100% identical to a polypeptide that begins at any one of amino acids of 24-34 of SEQ ID NO: 83 and ends at any one of amino acids 101-126 of SEQ ID NO: 83. In certain preferred embodiments, hemojuvelin:ALK4 heteromultimers are soluble. In some embodiments, a hemojuvelin:ALK4 heteromultimer of the disclosure binds to one or more TGF-beta superfamily ligands (e.g., binds to one or more TGF-beta superfamily ligands with a K_{D} of at least 1×10⁻⁷). In some embodiments, a hemojuvelin:ALK4 heteromultimer of the disclosure inhibits one or more TGF-beta superfamily ligands (e.g., inhibits Smad signaling). Heteromultimer-ligand binding and inhibition may be determined using a variety of assays including, for example, those described herein (e.g., in vitro binding and/or cell-based signaling assays). In some embodiments, a hemojuvelin:ALK4 heteromultimer of the disclosure has a different TGF-beta ligand binding and/or inhibition profile (specificity) compared to a corresponding homomultimer (e.g., hemojuvelin and ALK4 homomultimers). In some embodiments, a hemojuvelin:ALK4 heteromultimer of the disclosure is a heterodimer.

[0087] In certain aspects, the disclosure relates to heteromultimers that comprise at least one hemojuvelin polypeptide, which includes fragments, functional variants, and modified forms thereof, and at least one ALK5 polypeptide, which includes fragments, functional variants, and modified forms thereof. In some embodiments, the hemojuvelin:ALK5 heteromultimer comprises a polypeptide that is at least 70%, 75%, 80%, 85%, 90%, 91%, 92%, 93%, 94%, 95%, 95%, 96%, 97%, 98%, 99%, or 100% identical to the amino acid sequence of any one of SEQ ID NOs: 573, 574, 577, 578, 581, or 582. In some embodiments, the hemojuvelin:ALK5 heteromultimer comprises a polypeptide that is at least 70%, 75%, 80%, 85%, 90%, 91%, 92%, 93%, 94%, 95%, 95%, 96%, 97%, 98%, 99%, or 100% identical to a polypeptide that begins at any one of amino acids of 1-36 of SEQ ID NO: 573 and ends at any one of amino acids 400-426 of SEQ ID NO: 573. In some embodiments, the hemojuvelin:ALK5 heteromultimer comprises a polypeptide that is at least 70%, 75%, 80%, 85%, 90%, 91%, 92%, 93%, 94%, 95%, 95%, 96%, 97%, 98%, 99%, or 100% identical to a polypeptide that begins at any one of amino acids of 36-42 of SEQ ID NO: 573 and ends at any one of amino acids 167-172 of SEQ ID NO: 573. In some embodiments, the hemojuvelin:ALK5 heteromultimer comprises a polypeptide that is at least 70%, 75%, 80%, 85%, 90%, 91%, 92%, 93%, 94%, 95%, 95%, 96%, 97%, 98%, 99%, or 100% identical to a polypeptide that begins at any one of amino acids of 173-185 of SEQ ID NO: 573 and ends at any one of amino acids 361-400 of SEQ ID NO: 573. In some embodiments, the hemojuvelin:ALK5 heteromultimer comprises a hemojuvelin protein that is a dimer comprising a first polypeptide that is at least 70%, 75%, 80%, 85%, 90%, 91%, 92%, 93%, 94%, 95%, 96%, 97%, 98%, 99%, or 100% identical to a polypeptide that begins at any one of amino acids of 36-42 of SEQ ID NO: 573, and ends at any one of amino acids 167-172 of SEQ ID NO: 573 and second polypeptide that is at least 70%, 75%, 80%, 85%, 90%, 91%, 92%, 93%, 94%, 95%, 96%, 97%, 98%, 99%, or 100% identical to a polypeptide that begins at any one of amino acids of 173-185 of SEQ ID NO: 573 and ends at any one of amino acids 361-400 of SEQ ID NO: 573. In some embodiments, the hemojuvelin:ALK5 heteromultimer comprises a single chain ligand trap that comprises a first hemojuvelin polypeptide domain that is at least 70%, 75%, 80%, 85%, 90%, 91%, 92%, 93%, 94%, 95%, 96%, 97%, 98%, 99%, or 100% identical to a polypeptide that begins at any one of amino acids of 36-42 of SEQ ID NO: 573 and ends at any one of amino acids 167-172 of SEQ ID NO: 573 and second hemojuvelin polypeptide domain that is at least 70%, 75%, 80%, 85%, 90%, 91%, 92%, 93%, 94%, 95%, 96%, 97%, 98%, 99%, or 100% identical to a polypeptide that begins at any one of amino acids of 173-185 of SEQ ID NO: 573 and ends at any one of amino acids 361-400 of SEQ ID NO: 573. In some embodiments, the hemojuvelin:ALK5 heteromultimer comprises a polypeptide that is at least 70%, 75%, 80%, 85%, 90%, 91%, 92%, 93%, 94%, 95%, 95%, 96%, 97%, 98%, 99%, or 100% identical to a polypeptide that begins at any one of amino acids of 1-6 of SEQ ID NO: 577 and ends at any one of amino acids 287-313 of SEQ ID NO: 577. In some embodiments, the hemojuvelin:ALK5 heteromultimer comprises a polypeptide that is at least 70%, 75%, 80%, 85%, 90%, 91%, 92%, 93%, 94%, 95%, 95%, 96%, 97%, 98%, 99%, or 100% identical to a polypeptide that begins at any one of amino acids of 1-6 of SEQ ID NO: 577 and ends at any one of amino acids 54-59 of SEQ ID NO: 577. In some embodiments, the hemojuvelin:ALK5 heteromultimer comprises a polypeptide that is at least 70%, 75%, 80%, 85%, 90%, 91%, 92%, 93%, 94%, 95%, 95%, 96%, 97%, 98%, 99%, or 100% identical to a polypeptide that begins at any one of amino acids of 60-72 of SEQ ID NO: 577 and ends at any one of amino acids 248-287 of SEQ ID NO: 577. In some embodiments, the hemojuvelin:ALK5 heteromultimer comprises a hemojuvelin protein, wherein the hemojuvelin protein is a dimer comprising a first polypeptide that is at least 70%, 75%, 80%, 85%, 90%, 91%, 92%, 93%, 94%, 95%, 96%, 97%, 98%, 99%, or 100% identical to a polypeptide that begins at any one of amino acids of 1-6 of SEQ ID NO: 577 and ends at any one of amino acids 54-59 of SEQ ID NO: 577, and second polypeptide that is at least 70%, 75%, 80%, 85%, 90%, 91%, 92%, 93%, 94%, 95%, 96%, 97%, 98%, 99%, or 100% identical to a polypeptide that begins at any one of amino acids of 60-72 of SEQ ID NO: 577 and ends at any one of amino acids 248-287 of SEQ ID NO: 577. In some embodiments, the hemojuvelin:ALK5 heteromultimer comprises a single chain ligand trap that comprises a first hemojuvelin polypeptide domain that is at least 70%, 75%, 80%, 85%, 90%, 91%, 92%, 93%, 94%, 95%, 96%, 97%, 98%, 99%, or 100% identical to a polypeptide that begins at any one of amino acids of 1-6 of SEQ ID NO: 577 and ends at any one of amino acids 54-59 of SEQ ID NO: 577, and second hemojuvelin polypeptide domain that is at least 70%, 75%, 80%, 85%, 90%, 91%, 92%, 93%, 94%, 95%, 96%, 97%, 98%, 99%, or 100% identical to a polypeptide that begins at any one of amino acids of 60-72 of SEQ ID NO: 577, and ends at any one of amino acids 248-287 of SEQ ID NO: 577. In some embodiments, the hemojuvelin:ALK5 heteromultimer comprises a polypeptide that is at least 70%, 75%, 80%, 85%, 90%, 91%, 92%, 93%, 94%, 95%, 95%, 96%, 97%, 98%, 99%, or 100% identical to a polypeptide that begins at any one of amino acids of 1-4 of SEQ ID NO: 581 and ends at any one of amino acids 135-200 of SEQ ID NO: 581. In some embodiments, the hemojuvelin:ALK5 heteromultimer comprises a polypeptide that is at least 70%, 75%, 80%, 85%, 90%, 91%, 92%, 93%, 94%, 95%, 95%, 96%, 97%, 98%, 99%, or 100% identical to the amino acid sequence of any one of SEQ ID NOs: SEQ ID NO: 30, 31, 87, or 88. In some embodiments the hemojuvelin:ALK5 heteromultimer comprises a polypeptide that is at least 70%, 75%, 80%, 85%, 90%, 91%, 92%, 93%, 94%, 95%, 95%, 96%, 97%, 98%, 99%, or 100% identical to a polypeptide that begins at any one of amino acids of 25-36 of SEQ ID NO: 30 and ends at any one of amino acids 101-126 of SEQ ID NO: 30. In some embodiments the hemojuvelin:ALK5 heteromultimer comprises a polypeptide that is at least 70%, 75%, 80%, 85%, 90%, 91%, 92%, 93%, 94%, 95%, 95%, 96%, 97%, 98%, 99%, or 100% identical to a polypeptide that begins at any one of amino acids of 25-36 of SEQ ID NO: 87 and ends at any one of amino acids 101-130 of SEQ ID NO: 87. In certain preferred embodiments, hemojuvelin:ALK5 heteromultimers are soluble. In some embodiments, a hemojuvelin:ALK5 heteromultimer of the disclosure binds to one or more TGF-beta superfamily ligands (e.g., binds to one or more TGF-beta superfamily ligands with a K_{D} of at least 1×10⁻⁷). In some embodiments, a hemojuvelin:ALK5 heteromultimer of the disclosure inhibits one or more TGF-beta superfamily ligands (e.g., inhibits Smad signaling). Heteromultimer-ligand binding and inhibition may be determined using a variety of assays including, for example, those described herein (e.g., in vitro binding and/or cell-based signaling assays). In some embodiments, a hemojuvelin:ALK5 heteromultimer of the disclosure has a different TGF-beta ligand binding and/or inhibition profile (specificity) compared to a corresponding homomultimer (e.g., hemojuvelin and ALK5 homomultimers). In some embodiments, a hemojuvelin:ALK5 heteromultimer of the disclosure is a heterodimer.

[0088] In certain aspects, the disclosure relates to heteromultimers that comprise at least one hemojuvelin polypeptide, which includes fragments, functional variants, and modified forms thereof, and at least one ALK6 polypeptide, which includes fragments, functional variants, and modified forms thereof. In some embodiments, the hemojuvelin:ALK6 heteromultimer comprises a polypeptide that is at least 70%, 75%, 80%, 85%, 90%, 91%, 92%, 93%, 94%, 95%, 95%, 96%, 97%, 98%, 99%, or 100% identical to the amino acid sequence of any one of SEQ ID NOs: 573, 574, 577, 578, 581, or 582. In some embodiments, the hemojuvelin:ALK6 heteromultimer comprises a polypeptide that is at least 70%, 75%, 80%, 85%, 90%, 91%, 92%, 93%, 94%, 95%, 95%, 96%, 97%, 98%, 99%, or 100% identical to a polypeptide that begins at any one of amino acids of 1-36 of SEQ ID NO: 573 and ends at any one of amino acids 400-426 of SEQ ID NO: 573. In some embodiments, the hemojuvelin:ALK6 heteromultimer comprises a polypeptide that is at least 70%, 75%, 80%, 85%, 90%, 91%, 92%, 93%, 94%, 95%, 95%, 96%, 97%, 98%, 99%, or 100% identical to a polypeptide that begins at any one of amino acids of 36-42 of SEQ ID NO: 573 and ends at any one of amino acids 167-172 of SEQ ID NO: 573. In some embodiments, the hemojuvelin:ALK6 heteromultimer comprises a polypeptide that is at least 70%, 75%, 80%, 85%, 90%, 91%, 92%, 93%, 94%, 95%, 95%, 96%, 97%, 98%, 99%, or 100% identical to a polypeptide that begins at any one of amino acids of 173-185 of SEQ ID NO: 573 and ends at any one of amino acids 361-400 of SEQ ID NO: 573. In some embodiments, the hemojuvelin:ALK6 heteromultimer comprises a hemojuvelin protein that is a dimer comprising a first polypeptide that is at least 70%, 75%, 80%, 85%, 90%, 91%, 92%, 93%, 94%, 95%, 96%, 97%, 98%, 99%, or 100% identical to a polypeptide that begins at any one of amino acids of 36-42 of SEQ ID NO: 573, and ends at any one of amino acids 167-172 of SEQ ID NO: 573 and second polypeptide that is at least 70%, 75%, 80%, 85%, 90%, 91%, 92%, 93%, 94%, 95%, 96%, 97%, 98%, 99%, or 100% identical to a polypeptide that begins at any one of amino acids of 173-185 of SEQ ID NO: 573 and ends at any one of amino acids 361-400 of SEQ ID NO: 573. In some embodiments, the hemojuvelin:ALK6 heteromultimer comprises a single chain ligand trap that comprises a first hemojuvelin polypeptide domain that is at least 70%, 75%, 80%, 85%, 90%, 91%, 92%, 93%, 94%, 95%, 96%, 97%, 98%, 99%, or 100% identical to a polypeptide that begins at any one of amino acids of 36-42 of SEQ ID NO: 573 and ends at any one of amino acids 167-172 of SEQ ID NO: 573 and second hemojuvelin polypeptide domain that is at least 70%, 75%, 80%, 85%, 90%, 91%, 92%, 93%, 94%, 95%, 96%, 97%, 98%, 99%, or 100% identical to a polypeptide that begins at any one of amino acids of 173-185 of SEQ ID NO: 573 and ends at any one of amino acids 361-400 of SEQ ID NO: 573. In some embodiments, the hemojuvelin:ALK6 heteromultimer comprises a polypeptide that is at least 70%, 75%, 80%, 85%, 90%, 91%, 92%, 93%, 94%, 95%, 95%, 96%, 97%, 98%, 99%, or 100% identical to a polypeptide that begins at any one of amino acids of 1-6 of SEQ ID NO: 577 and ends at any one of amino acids 287-313 of SEQ ID NO: 577. In some embodiments, the hemojuvelin:ALK6 heteromultimer comprises a polypeptide that is at least 70%, 75%, 80%, 85%, 90%, 91%, 92%, 93%, 94%, 95%, 95%, 96%, 97%, 98%, 99%, or 100% identical to a polypeptide that begins at any one of amino acids of 1-6 of SEQ ID NO: 577 and ends at any one of amino acids 54-59 of SEQ ID NO: 577. In some embodiments, the hemojuvelin:ALK6 heteromultimer comprises a polypeptide that is at least 70%, 75%, 80%, 85%, 90%, 91%, 92%, 93%, 94%, 95%, 95%, 96%, 97%, 98%, 99%, or 100% identical to a polypeptide that begins at any one of amino acids of 60-72 of SEQ ID NO: 577 and ends at any one of amino acids 248-287 of SEQ ID NO: 577. In some embodiments, the hemojuvelin:ALK6 heteromultimer comprises a hemojuvelin protein, wherein the hemojuvelin protein is a dimer comprising a first polypeptide that is at least 70%, 75%, 80%, 85%, 90%, 91%, 92%, 93%, 94%, 95%, 96%, 97%, 98%, 99%, or 100% identical to a polypeptide that begins at any one of amino acids of 1-6 of SEQ ID NO: 577 and ends at any one of amino acids 54-59 of SEQ ID NO: 577, and second polypeptide that is at least 70%, 75%, 80%, 85%, 90%, 91%, 92%, 93%, 94%, 95%, 96%, 97%, 98%, 99%, or 100% identical to a polypeptide that begins at any one of amino acids of 60-72 of SEQ ID NO: 577 and ends at any one of amino acids 248-287 of SEQ ID NO: 577. In some embodiments, the hemojuvelin:ALK6 heteromultimer comprises a single chain ligand trap that comprises a first hemojuvelin polypeptide domain that is at least 70%, 75%, 80%, 85%, 90%, 91%, 92%, 93%, 94%, 95%, 96%, 97%, 98%, 99%, or 100% identical to a polypeptide that begins at any one of amino acids of 1-6 of SEQ ID NO: 577 and ends at any one of amino acids 54-59 of SEQ ID NO: 577, and second hemojuvelin polypeptide domain that is at least 70%, 75%, 80%, 85%, 90%, 91%, 92%, 93%, 94%, 95%, 96%, 97%, 98%, 99%, or 100% identical to a polypeptide that begins at any one of amino acids of 60-72 of SEQ ID NO: 577, and ends at any one of amino acids 248-287 of SEQ ID NO: 577. In some embodiments, the hemojuvelin:ALK6 heteromultimer comprises a polypeptide that is at least 70%, 75%, 80%, 85%, 90%, 91%, 92%, 93%, 94%, 95%, 95%, 96%, 97%, 98%, 99%, or 100% identical to a polypeptide that begins at any one of amino acids of 1-4 of SEQ ID NO: 581 and ends at any one of amino acids 135-200 of SEQ ID NO: 581. In some embodiments, the hemojuvelin:ALK6 heteromultimer comprises a polypeptide that is at least 70%, 75%, 80%, 85%, 90%, 91%, 92%, 93%, 94%, 95%, 95%, 96%, 97%, 98%, 99%, or 100% identical to the amino acid sequence of any one of SEQ ID NOs: SEQ ID NO: 34, 35, 91, or 92. In some embodiments the hemojuvelin:ALK6 heteromultimer comprises a polypeptide that is at least 70%, 75%, 80%, 85%, 90%, 91%, 92%, 93%, 94%, 95%, 95%, 96%, 97%, 98%, 99%, or 100% identical to a polypeptide that begins at any one of amino acids of 14-32 of SEQ ID NO: 34 and ends at any one of amino acids 102-126 of SEQ ID NO: 34. In some embodiments the hemojuvelin:ALK6 heteromultimer comprises a polypeptide that is at least 70%, 75%, 80%, 85%, 90%, 91%, 92%, 93%, 94%, 95%, 95%, 96%, 97%, 98%, 99%, or 100% identical to a polypeptide that begins at any one of amino acids of 26-62 of SEQ ID NO: 91 and ends at any one of amino acids 132-156 of SEQ ID NO: 91. In certain preferred embodiments, hemojuvelin:ALK6 heteromultimers are soluble. In some embodiments, a hemojuvelin:ALK6 heteromultimer of the disclosure binds to one or more TGF-beta superfamily ligands (e.g., binds to one or more TGF-beta superfamily ligands with a K_{D} of at least 1×10⁻⁷). In some embodiments, a hemojuvelin:ALK6 heteromultimer of the disclosure inhibits one or more TGF-beta superfamily ligands (e.g., inhibits Smad signaling). Heteromultimer-ligand binding and inhibition may be determined using a variety of assays including, for example, those described herein (e.g., in vitro binding and/or cell-based signaling assays). In some embodiments, a hemojuvelin:ALK6 heteromultimer of the disclosure has a different TGF-beta ligand binding and/or inhibition profile (specificity) compared to a corresponding homomultimer (e.g., hemojuvelin and ALK6 homomultimers). In some embodiments, a hemojuvelin:ALK6 heteromultimer of the disclosure is a heterodimer.

[0089] In certain aspects, the disclosure relates to heteromultimers that comprise at least one hemojuvelin polypeptide, which includes fragments, functional variants, and modified forms thereof, and at least one ALK7 polypeptide, which includes fragments, functional variants, and modified forms thereof. In some embodiments, the hemojuvelin:ALK7 heteromultimer comprises a polypeptide that is at least 70%, 75%, 80%, 85%, 90%, 91%, 92%, 93%, 94%, 95%, 95%, 96%, 97%, 98%, 99%, or 100% identical to the amino acid sequence of any one of SEQ ID NOs: 573, 574, 577, 578, 581, or 582. In some embodiments, the hemojuvelin:ALK7 heteromultimer comprises a polypeptide that is at least 70%, 75%, 80%, 85%, 90%, 91%, 92%, 93%, 94%, 95%, 95%, 96%, 97%, 98%, 99%, or 100% identical to a polypeptide that begins at any one of amino acids of 1-36 of SEQ ID NO: 573 and ends at any one of amino acids 400-426 of SEQ ID NO: 573. In some embodiments, the hemojuvelin:ALK7 heteromultimer comprises a polypeptide that is at least 70%, 75%, 80%, 85%, 90%, 91%, 92%, 93%, 94%, 95%, 95%, 96%, 97%, 98%, 99%, or 100% identical to a polypeptide that begins at any one of amino acids of 36-42 of SEQ ID NO: 573 and ends at any one of amino acids 167-172 of SEQ ID NO: 573. In some embodiments, the hemojuvelin:ALK7 heteromultimer comprises a polypeptide that is at least 70%, 75%, 80%, 85%, 90%, 91%, 92%, 93%, 94%, 95%, 95%, 96%, 97%, 98%, 99%, or 100% identical to a polypeptide that begins at any one of amino acids of 173-185 of SEQ ID NO: 573 and ends at any one of amino acids 361-400 of SEQ ID NO: 573. In some embodiments, the hemojuvelin:ALK7 heteromultimer comprises a hemojuvelin protein that is a dimer comprising a first polypeptide that is at least 70%, 75%, 80%, 85%, 90%, 91%, 92%, 93%, 94%, 95%, 96%, 97%, 98%, 99%, or 100% identical to a polypeptide that begins at any one of amino acids of 36-42 of SEQ ID NO: 573, and ends at any one of amino acids 167-172 of SEQ ID NO: 573 and second polypeptide that is at least 70%, 75%, 80%, 85%, 90%, 91%, 92%, 93%, 94%, 95%, 96%, 97%, 98%, 99%, or 100% identical to a polypeptide that begins at any one of amino acids of 173-185 of SEQ ID NO: 573 and ends at any one of amino acids 361-400 of SEQ ID NO: 573. In some embodiments, the hemojuvelin:ALK7 heteromultimer comprises a single chain ligand trap that comprises a first hemojuvelin polypeptide domain that is at least 70%, 75%, 80%, 85%, 90%, 91%, 92%, 93%, 94%, 95%, 96%, 97%, 98%, 99%, or 100% identical to a polypeptide that begins at any one of amino acids of 36-42 of SEQ ID NO: 573 and ends at any one of amino acids 167-172 of SEQ ID NO: 573 and second hemojuvelin polypeptide domain that is at least 70%, 75%, 80%, 85%, 90%, 91%, 92%, 93%, 94%, 95%, 96%, 97%, 98%, 99%, or 100% identical to a polypeptide that begins at any one of amino acids of 173-185 of SEQ ID NO: 573 and ends at any one of amino acids 361-400 of SEQ ID NO: 573. In some embodiments, the hemojuvelin:ALK7 heteromultimer comprises a polypeptide that is at least 70%, 75%, 80%, 85%, 90%, 91%, 92%, 93%, 94%, 95%, 95%, 96%, 97%, 98%, 99%, or 100% identical to a polypeptide that begins at any one of amino acids of 1-6 of SEQ ID NO: 577 and ends at any one of amino acids 287-313 of SEQ ID NO: 577. In some embodiments, the hemojuvelin:ALK7 heteromultimer comprises a polypeptide that is at least 70%, 75%, 80%, 85%, 90%, 91%, 92%, 93%, 94%, 95%, 95%, 96%, 97%, 98%, 99%, or 100% identical to a polypeptide that begins at any one of amino acids of 1-6 of SEQ ID NO: 577 and ends at any one of amino acids 54-59 of SEQ ID NO: 577. In some embodiments, the hemojuvelin:ALK7 heteromultimer comprises a polypeptide that is at least 70%, 75%, 80%, 85%, 90%, 91%, 92%, 93%, 94%, 95%, 95%, 96%, 97%, 98%, 99%, or 100% identical to a polypeptide that begins at any one of amino acids of 60-72 of SEQ ID NO: 577 and ends at any one of amino acids 248-287 of SEQ ID NO: 577. In some embodiments, the hemojuvelin:ALK7 heteromultimer comprises a hemojuvelin protein, wherein the hemojuvelin protein is a dimer comprising a first polypeptide that is at least 70%, 75%, 80%, 85%, 90%, 91%, 92%, 93%, 94%, 95%, 96%, 97%, 98%, 99%, or 100% identical to a polypeptide that begins at any one of amino acids of 1-6 of SEQ ID NO: 577 and ends at any one of amino acids 54-59 of SEQ ID NO: 577, and second polypeptide that is at least 70%, 75%, 80%, 85%, 90%, 91%, 92%, 93%, 94%, 95%, 96%, 97%, 98%, 99%, or 100% identical to a polypeptide that begins at any one of amino acids of 60-72 of SEQ ID NO: 577 and ends at any one of amino acids 248-287 of SEQ ID NO: 577. In some embodiments, the hemojuvelin:ALK7 heteromultimer comprises a single chain ligand trap that comprises a first hemojuvelin polypeptide domain that is at least 70%, 75%, 80%, 85%, 90%, 91%, 92%, 93%, 94%, 95%, 96%, 97%, 98%, 99%, or 100% identical to a polypeptide that begins at any one of amino acids of 1-6 of SEQ ID NO: 577 and ends at any one of amino acids 54-59 of SEQ ID NO: 577, and second hemojuvelin polypeptide domain that is at least 70%, 75%, 80%, 85%, 90%, 91%, 92%, 93%, 94%, 95%, 96%, 97%, 98%, 99%, or 100% identical to a polypeptide that begins at any one of amino acids of 60-72 of SEQ ID NO: 577, and ends at any one of amino acids 248-287 of SEQ ID NO: 577. In some embodiments, the hemojuvelin:ALK7 heteromultimer comprises a polypeptide that is at least 70%, 75%, 80%, 85%, 90%, 91%, 92%, 93%, 94%, 95%, 95%, 96%, 97%, 98%, 99%, or 100% identical to a polypeptide that begins at any one of amino acids of 1-4 of SEQ ID NO: 581 and ends at any one of amino acids 135-200 of SEQ ID NO: 581. In some embodiments, the hemojuvelin:ALK7 heteromultimer comprises a polypeptide that is at least 70%, 75%, 80%, 85%, 90%, 91%, 92%, 93%, 94%, 95%, 95%, 96%, 97%, 98%, 99%, or 100% identical to the amino acid sequence of any one of SEQ ID NOs: SEQ ID NO: 38, 39, 301, 302, 305, 306, 309, 310, or 313. In some embodiments the hemojuvelin:ALK7 heteromultimer comprises a polypeptide that is at least 70%, 75%, 80%, 85%, 90%, 91%, 92%, 93%, 94%, 95%, 95%, 96%, 97%, 98%, 99%, or 100% identical to a polypeptide that begins at any one of amino acids of 21-28 of SEQ ID NO: 38 and ends at any one of amino acids 92-113 of SEQ ID NO: 38. In some embodiments the hemojuvelin:ALK7 heteromultimer comprises a polypeptide that is at least 70%, 75%, 80%, 85%, 90%, 91%, 92%, 93%, 94%, 95%, 95%, 96%, 97%, 98%, 99%, or 100% identical to a polypeptide that begins at any one of amino acids of 1-13 of SEQ ID NO: 301 and ends at any one of amino acids 42-63 of SEQ ID NO: 301. In some embodiments the hemojuvelin:ALK7 heteromultimer comprises a polypeptide that is at least 70%, 75%, 80%, 85%, 90%, 91%, 92%, 93%, 94%, 95%, 95%, 96%, 97%, 98%, 99%, or 100% identical to a polypeptide that begins at any one of amino acids of 21-28 of SEQ ID NO: 305 and ends at any one of amino acids 411-413 of SEQ ID NO: 305. In some embodiments the hemojuvelin:ALK7 heteromultimer comprises a polypeptide that is at least 70%, 75%, 80%, 85%, 90%, 91%, 92%, 93%, 94%, 95%, 95%, 96%, 97%, 98%, 99%, or 100% identical to a polypeptide that begins at any one of amino acids of 21-28 of SEQ ID NO: 309 and ends at any one of amino acids 334-336 of SEQ ID NO: 309. In certain preferred embodiments, hemojuvelin:ALK7 heteromultimers are soluble. In some embodiments, a hemojuvelin:ALK7 heteromultimer of the disclosure binds to one or more TGF-beta superfamily ligands (e.g., binds to one or more TGF-beta superfamily ligands with a K_{D} of at least 1×10⁻⁷). In some embodiments, a hemojuvelin:ALK7 heteromultimer of the disclosure inhibits one or more TGF-beta superfamily ligands (e.g., inhibits Smad signaling). Heteromultimer-ligand binding and inhibition may be determined using a variety of assays including, for example, those described herein (e.g., in vitro binding and/or cell-based signaling assays). In some embodiments, a hemojuvelin:ALK7 heteromultimer of the disclosure has a different TGF-beta ligand binding and/or inhibition profile (specificity) compared to a corresponding homomultimer (e.g., hemojuvelin and ALK7 homomultimers). In some embodiments, a hemojuvelin:ALK7 heteromultimer of the disclosure is a heterodimer.

[0090] In certain aspects, the disclosure relates to heteromultimers that comprise at least one endoglin polypeptide, which includes fragments, functional variants, and modified forms thereof, and at least one ActRIIA polypeptide, which includes fragments, functional variants, and modified forms thereof. In some embodiments, the endoglin:ActRIIA heteromultimer comprises a polypeptide that is at least 70%, 75%, 80%, 85%, 90%, 91%, 92%, 93%, 94%, 95%, 95%, 96%, 97%, 98%, 99%, or 100% identical to the amino acid sequence of any one of SEQ ID NOs: 501, 502, 505, 506, 509, 510, 593, or 594. In some embodiments, the endoglin:ActRIIA heteromultimer comprises a polypeptide that is at least 70%, 75%, 80%, 85%, 90%, 91%, 92%, 93%, 94%, 95%, 95%, 96%, 97%, 98%, 99%, or 100% identical to a polypeptide that begins at any one of amino acids of 26-30 of SEQ ID NO: 501 and ends at any one of amino acids 330-346 of SEQ ID NO: 501. In some embodiments, the endoglin:ActRIIA heteromultimer comprises a polypeptide that is at least 70%, 75%, 80%, 85%, 90%, 91%, 92%, 93%, 94%, 95%, 95%, 96%, 97%, 98%, 99%, or 100% identical to a polypeptide that begins at any one of amino acids of 26-30 of SEQ ID NO: 505 and ends at any one of amino acids 330-346 of SEQ ID NO: 505. In some embodiments, the endoglin:ActRIIA heteromultimer comprises a polypeptide that is at least 70%, 75%, 80%, 85%, 90%, 91%, 92%, 93%, 94%, 95%, 95%, 96%, 97%, 98%, 99%, or 100% identical to a polypeptide that begins at any one of amino acids of 1-25 of SEQ ID NO: 509, and ends at any one of amino acids 148-164 of SEQ ID NO: 509. In some embodiments, a endoglin:ActRIIA heteromultimer comprises a polypeptide that is at least 70%, 75%, 80%, 85%, 90%, 91%, 92%, 93%, 94%, 95%, 95%, 96%, 97%, 98%, 99%, or 100% identical to the amino acid sequence of any one of SEQ ID NOs: 9, 10, and 11. In some embodiments, a endoglin:ActRIIA heteromultimer comprises a polypeptide that is at least 70%, 75%, 80%, 85%, 90%, 91%, 92%, 93%, 94%, 95%, 95%, 96%, 97%, 98%, 99%, or 100% identical to a polypeptide that begins at any one of amino acids of 21-30 of SEQ ID NO: 9, and ends at any one of amino acids 110-135 of SEQ ID NO: 9. In certain preferred embodiments, endoglin:ActRIIA heteromultimers are soluble. In some embodiments, a endoglin:ActRIIA heteromultimer of the disclosure binds to one or more TGF-beta superfamily ligands (e.g., binds to one or more TGF-beta superfamily ligands with a K_{D} of at least 1×10⁻⁷). In some embodiments, a endoglin:ActRIIA heteromultimer of the disclosure inhibits one or more TGF-beta superfamily ligands (e.g., inhibits Smad signaling). Heteromultimer-ligand binding and inhibition may be determined using a variety of assays including, for example, those described herein (e.g., in vitro binding and/or cell-based signaling assays). In some embodiments, a endoglin:ActRIIA heteromultimer of the disclosure has a different TGF-beta ligand binding and/or inhibition profile (specificity) compared to a corresponding homomultimer (e.g., endoglin and ActRIIA homomultimers). In some embodiments, a endoglin:ActRIIA heteromultimer of the disclosure is a heterodimer.

[0091] In certain aspects, the disclosure relates to heteromultimers that comprise at least one endoglin polypeptide, which includes fragments, functional variants, and modified forms thereof, and at least one ActRIIB polypeptide, which includes fragments, functional variants, and modified forms thereof. In some embodiments, the endoglin:ActRIIB heteromultimer comprises a polypeptide that is at least 70%, 75%, 80%, 85%, 90%, 91%, 92%, 93%, 94%, 95%, 95%, 96%, 97%, 98%, 99%, or 100% identical to the amino acid sequence of any one of SEQ ID NOs: 501, 502, 505, 506, 509, 510, 593, or 594. In some embodiments, the endoglin:ActRIIB heteromultimer comprises a polypeptide that is at least 70%, 75%, 80%, 85%, 90%, 91%, 92%, 93%, 94%, 95%, 95%, 96%, 97%, 98%, 99%, or 100% identical to a polypeptide that begins at any one of amino acids of 26-30 of SEQ ID NO: 501 and ends at any one of amino acids 330-346 of SEQ ID NO: 501. In some embodiments, the endoglin:ActRIIB heteromultimer comprises a polypeptide that is at least 70%, 75%, 80%, 85%, 90%, 91%, 92%, 93%, 94%, 95%, 95%, 96%, 97%, 98%, 99%, or 100% identical to a polypeptide that begins at any one of amino acids of 26-30 of SEQ ID NO: 505 and ends at any one of amino acids 330-346 of SEQ ID NO: 505. In some embodiments, the endoglin:ActRIIB heteromultimer comprises a polypeptide that is at least 70%, 75%, 80%, 85%, 90%, 91%, 92%, 93%, 94%, 95%, 95%, 96%, 97%, 98%, 99%, or 100% identical to a polypeptide that begins at any one of amino acids of 1-25 of SEQ ID NO: 509, and ends at any one of amino acids 148-164 of SEQ ID NO: 509. In some embodiments, a endoglin:ActRIIB heteromultimer comprises a polypeptide that is at least 70%, 75%, 80%, 85%, 90%, 91%, 92%, 93%, 94%, 95%, 95%, 96%, 97%, 98%, 99%, or 100% identical to the amino acid sequence of any one of SEQ ID NOs: 1, 2, 3, 4, 5, and 6. In some embodiments, a endoglin:ActRIIB heteromultimer comprises a polypeptide that is at least 70%, 75%, 80%, 85%, 90%, 91%, 92%, 93%, 94%, 95%, 95%, 96%, 97%, 98%, 99%, or 100% identical to a polypeptide that begins at any one of amino acids 20-29 of SEQ ID NO: 1 and ends at a position corresponding to any one of amino acids 109-134 of SEQ ID NO: 1. In some embodiments, a endoglin:ActRIIB heteromultimer comprises an ActRIIB polypeptide wherein the amino acid position corresponding to L79 of SEQ ID NO: 1 is not an acidic amino acid. In certain preferred embodiments, endoglin:ActRIIB heteromultimers are soluble. In some embodiments, a endoglin:ActRIIB heteromultimer of the disclosure binds to one or more TGF-beta superfamily ligands (e.g., binds to one or more TGF-beta superfamily ligands with a K_{D} of at least 1×10⁻⁷). In some embodiments, a endoglin:ActRIIB heteromultimer of the disclosure inhibits one or more TGF-beta superfamily ligands (e.g., inhibits Smad signaling). Heteromultimer-ligand binding and inhibition may be determined using a variety of assays including, for example, those described herein (e.g., in vitro binding and/or cell-based signaling assays). In some embodiments, a endoglin:ActRIIB heteromultimer of the disclosure has a different TGF-beta ligand binding and/or inhibition profile (specificity) compared to a corresponding homomultimer (e.g., endoglin and ActRIIB homomultimers). In some embodiments, a endoglin:ActRIIB heteromultimer of the disclosure is a heterodimer.

[0092] In certain aspects, the disclosure relates to heteromultimers that comprise at least one endoglin polypeptide, which includes fragments, functional variants, and modified forms thereof, and at least one TGFBRII polypeptide, which includes fragments, functional variants, and modified forms thereof. In some embodiments, the endoglin:TGFBRII heteromultimer comprises a polypeptide that is at least 70%, 75%, 80%, 85%, 90%, 91%, 92%, 93%, 94%, 95%, 95%, 96%, 97%, 98%, 99%, or 100% identical to the amino acid sequence of any one of SEQ ID NOs: 501, 502, 505, 506, 509, 510, 593, or 594. In some embodiments, the endoglin:TGFBRII heteromultimer comprises a polypeptide that is at least 70%, 75%, 80%, 85%, 90%, 91%, 92%, 93%, 94%, 95%, 95%, 96%, 97%, 98%, 99%, or 100% identical to a polypeptide that begins at any one of amino acids of 26-30 of SEQ ID NO: 501 and ends at any one of amino acids 330-346 of SEQ ID NO: 501. In some embodiments, the endoglin:TGFBRII heteromultimer comprises a polypeptide that is at least 70%, 75%, 80%, 85%, 90%, 91%, 92%, 93%, 94%, 95%, 95%, 96%, 97%, 98%, 99%, or 100% identical to a polypeptide that begins at any one of amino acids of 26-30 of SEQ ID NO: 505 and ends at any one of amino acids 330-346 of SEQ ID NO: 505. In some embodiments, the endoglin:TGFBRII heteromultimer comprises a polypeptide that is at least 70%, 75%, 80%, 85%, 90%, 91%, 92%, 93%, 94%, 95%, 95%, 96%, 97%, 98%, 99%, or 100% identical to a polypeptide that begins at any one of amino acids of 1-25 of SEQ ID NO: 509, and ends at any one of amino acids 148-164 of SEQ ID NO: 509. In some embodiments, a endoglin:TGFBRII heteromultimer comprises a polypeptide that is at least 70%, 75%, 80%, 85%, 90%, 91%, 92%, 93%, 94%, 95%, 95%, 96%, 97%, 98%, 99%, or 100% identical to the amino acid sequence of any one of SEQ ID NOs: 42, 43, 67, or 68. In some embodiments, a endoglin:TGFBRII heteromultimer comprises a polypeptide that is at least 70%, 75%, 80%, 85%, 90%, 91%, 92%, 93%, 94%, 95%, 95%, 96%, 97%, 98%, 99%, or 100% identical to a polypeptide that begins at any one of amino acids of 23-51 of SEQ ID NO: 42 and ends at any one of amino acids 143-166 of SEQ ID NO: 42. In some embodiments, a endoglin:TGFBRII heteromultimer comprises a polypeptide that is at least 70%, 75%, 80%, 85%, 90%, 91%, 92%, 93%, 94%, 95%, 95%, 96%, 97%, 98%, 99%, or 100% identical to a polypeptide that begins at any one of amino acids of 23-44 of SEQ ID NO: 67 and ends at any one of amino acids 168-191 of SEQ ID NO: 67. In certain preferred embodiments, endoglin:TGFBRII heteromultimers are soluble. In some embodiments, a endoglin:TGFBRII heteromultimer of the disclosure binds to one or more TGF-beta superfamily ligands (e.g., binds to one or more TGF-beta superfamily ligands with a K_{D} of at least 1×10⁻⁷). In some embodiments, a endoglin:TGFBRII heteromultimer of the disclosure inhibits one or more TGF-beta superfamily ligands (e.g., inhibits Smad signaling). Heteromultimer-ligand binding and inhibition may be determined using a variety of assays including, for example, those described herein (e.g., in vitro binding and/or cell-based signaling assays). In some embodiments, a endoglin:TGFBRII heteromultimer of the disclosure has a different TGF-beta ligand binding and/or inhibition profile (specificity) compared to a corresponding homomultimer (e.g., endoglin and TGFBRII homomultimers). In some embodiments, a endoglin:TGFBRII heteromultimer of the disclosure is a heterodimer.

[0093] In certain aspects, the disclosure relates to heteromultimers that comprise at least one endoglin polypeptide, which includes fragments, functional variants, and modified forms thereof, and at least one BMPRII polypeptide, which includes fragments, functional variants, and modified forms thereof. In some embodiments, the endoglin:BMPRII heteromultimer comprises a polypeptide that is at least 70%, 75%, 80%, 85%, 90%, 91%, 92%, 93%, 94%, 95%, 95%, 96%, 97%, 98%, 99%, or 100% identical to the amino acid sequence of any one of SEQ ID NOs: 501, 502, 505, 506, 509, 510, 593, or 594. In some embodiments, the endoglin:BMPRII heteromultimer comprises a polypeptide that is at least 70%, 75%, 80%, 85%, 90%, 91%, 92%, 93%, 94%, 95%, 95%, 96%, 97%, 98%, 99%, or 100% identical to a polypeptide that begins at any one of amino acids of 26-30 of SEQ ID NO: 501 and ends at any one of amino acids 330-346 of SEQ ID NO: 501. In some embodiments, the endoglin:BMPRII heteromultimer comprises a polypeptide that is at least 70%, 75%, 80%, 85%, 90%, 91%, 92%, 93%, 94%, 95%, 95%, 96%, 97%, 98%, 99%, or 100% identical to a polypeptide that begins at any one of amino acids of 26-30 of SEQ ID NO: 505 and ends at any one of amino acids 330-346 of SEQ ID NO: 505. In some embodiments, the endoglin:BMPRII heteromultimer comprises a polypeptide that is at least 70%, 75%, 80%, 85%, 90%, 91%, 92%, 93%, 94%, 95%, 95%, 96%, 97%, 98%, 99%, or 100% identical to a polypeptide that begins at any one of amino acids of 1-25 of SEQ ID NO: 509, and ends at any one of amino acids 148-164 of SEQ ID NO: 509. In some embodiments, a endoglin:BMPRII heteromultimer comprises a polypeptide that is at least 70%, 75%, 80%, 85%, 90%, 91%, 92%, 93%, 94%, 95%, 95%, 96%, 97%, 98%, 99%, or 100% identical to the amino acid sequence of any one of SEQ ID NOs: 46, 47, 71, or 72. In some embodiments, a endoglin:BMPRII heteromultimer comprises a polypeptide that is at least 70%, 75%, 80%, 85%, 90%, 91%, 92%, 93%, 94%, 95%, 95%, 96%, 97%, 98%, 99%, or 100% identical to a polypeptide that begins at any one of amino acids of 27-34 of SEQ ID NO: 46 and ends at any one of amino acids 123-150 of SEQ ID NO: 46. In some embodiments, a endoglin:BMPRII heteromultimer comprises a polypeptide that is at least 70%, 75%, 80%, 85%, 90%, 91%, 92%, 93%, 94%, 95%, 95%, 96%, 97%, 98%, 99%, or 100% identical to a polypeptide that begins at any one of amino acids of 27-34 of SEQ ID NO: 71 and ends at any one of amino acids 123-150 of SEQ ID NO: 71. In certain preferred embodiments, endoglin:BMPRII heteromultimers are soluble. In some embodiments, a endoglin:BMPRII heteromultimer of the disclosure binds to one or more TGF-beta superfamily ligands (e.g., binds to one or more TGF-beta superfamily ligands with a K_{D} of at least 1×10⁻⁷). In some embodiments, a endoglin:BMPRII heteromultimer of the disclosure inhibits one or more TGF-beta superfamily ligands (e.g., inhibits Smad signaling). Heteromultimer-ligand binding and inhibition may be determined using a variety of assays including, for example, those described herein (e.g., in vitro binding and/or cell-based signaling assays). In some embodiments, a endoglin:BMPRII heteromultimer of the disclosure has a different TGF-beta ligand binding and/or inhibition profile (specificity) compared to a corresponding homomultimer (e.g., endoglin and BMPRII homomultimers). In some embodiments, a endoglin:BMPRII heteromultimer of the disclosure is a heterodimer.

[0094] In certain aspects, the disclosure relates to heteromultimers that comprise at least one endoglin polypeptide, which includes fragments, functional variants, and modified forms thereof, and at least one MISRII polypeptide, which includes fragments, functional variants, and modified forms thereof. In some embodiments, the endoglin:MISRII heteromultimer comprises a polypeptide that is at least 70%, 75%, 80%, 85%, 90%, 91%, 92%, 93%, 94%, 95%, 95%, 96%, 97%, 98%, 99%, or 100% identical to the amino acid sequence of any one of SEQ ID NOs: 501, 502, 505, 506, 509, 510, 593, or 594. In some embodiments, the endoglin:MISRII heteromultimer comprises a polypeptide that is at least 70%, 75%, 80%, 85%, 90%, 91%, 92%, 93%, 94%, 95%, 95%, 96%, 97%, 98%, 99%, or 100% identical to a polypeptide that begins at any one of amino acids of 26-30 of SEQ ID NO: 501 and ends at any one of amino acids 330-346 of SEQ ID NO: 501. In some embodiments, the endoglin:MISRII heteromultimer comprises a polypeptide that is at least 70%, 75%, 80%, 85%, 90%, 91%, 92%, 93%, 94%, 95%, 95%, 96%, 97%, 98%, 99%, or 100% identical to a polypeptide that begins at any one of amino acids of 26-30 of SEQ ID NO: 505 and ends at any one of amino acids 330-346 of SEQ ID NO: 505. In some embodiments, the endoglin:MISRII heteromultimer comprises a polypeptide that is at least 70%, 75%, 80%, 85%, 90%, 91%, 92%, 93%, 94%, 95%, 95%, 96%, 97%, 98%, 99%, or 100% identical to a polypeptide that begins at any one of amino acids of 1-25 of SEQ ID NO: 509, and ends at any one of amino acids 148-164 of SEQ ID NO: 509. In some embodiments, a endoglin:MISRII heteromultimer comprises a polypeptide that is at least 70%, 75%, 80%, 85%, 90%, 91%, 92%, 93%, 94%, 95%, 95%, 96%, 97%, 98%, 99%, or 100% identical to the amino acid sequence of any one of SEQ ID NOs: 50, 51, 75, 76, 79, or 80. In some embodiments, a endoglin:MISRII heteromultimer comprises a polypeptide that is at least 70%, 75%, 80%, 85%, 90%, 91%, 92%, 93%, 94%, 95%, 95%, 96%, 97%, 98%, 99%, or 100% identical to a polypeptide that begins at any one of amino acids of 17-24 of SEQ ID NO: 50 and ends at any one of amino acids 116-149 of SEQ ID NO: 50. In some embodiments, a endoglin:MISRII heteromultimer comprises a polypeptide that is at least 70%, 75%, 80%, 85%, 90%, 91%, 92%, 93%, 94%, 95%, 95%, 96%, 97%, 98%, 99%, or 100% identical to a polypeptide that begins at any one of amino acids of 17-24 of SEQ ID NO: 75 and ends at any one of amino acids 116-149 of SEQ ID NO: 75. In some embodiments, a endoglin:MISRII heteromultimer comprises a polypeptide that is at least 70%, 75%, 80%, 85%, 90%, 91%, 92%, 93%, 94%, 95%, 95%, 96%, 97%, 98%, 99%, or 100% identical to a polypeptide that begins at any one of amino acids of 17-24 of SEQ ID NO: 50 and ends at any one of amino acids 116-149 of SEQ ID NO: 79. In certain preferred embodiments, endoglin:MISRII heteromultimers are soluble. In some embodiments, a endoglin:MISRII heteromultimer of the disclosure binds to one or more TGF-beta superfamily ligands (e.g., binds to one or more TGF-beta superfamily ligands with a K_{D} of at least 1×10⁻⁷). In some embodiments, a endoglin:MISRII heteromultimer of the disclosure inhibits one or more TGF-beta superfamily ligands (e.g., inhibits Smad signaling). Heteromultimer-ligand binding and inhibition may be determined using a variety of assays including, for example, those described herein (e.g., in vitro binding and/or cell-based signaling assays). In some embodiments, a endoglin:MISRII heteromultimer of the disclosure has a different TGF-beta ligand binding and/or inhibition profile (specificity) compared to a corresponding homomultimer (e.g., endoglin and MISRII homomultimers). In some embodiments, a endoglin:MISRII heteromultimer of the disclosure is a heterodimer.

[0095] In certain aspects, the disclosure relates to heteromultimers that comprise at least one betaglycan polypeptide, which includes fragments, functional variants, and modified forms thereof, and at least one ActRIIA polypeptide, which includes fragments, functional variants, and modified forms thereof. In some embodiments, the betaglycan:ActRIIA heteromultimer comprises a polypeptide that is at least 70%, 75%, 80%, 85%, 90%, 91%, 92%, 93%, 94%, 95%, 95%, 96%, 97%, 98%, 99%, or 100% identical to the amino acid sequence of any one of SEQ ID NOs: 585, 586, 589, or 590. In some embodiments, the betaglycan:ActRIIA heteromultimer comprises a polypeptide that is at least 70%, 75%, 80%, 85%, 90%, 91%, 92%, 93%, 94%, 95%, 95%, 96%, 97%, 98%, 99%, or 100% identical to a polypeptide that begins at any one of amino acids of 21-28 of SEQ ID NO: 585 and ends at any one of amino acids 381-787 of SEQ ID NO: 585. In some embodiments, the betaglycan:ActRIIA heteromultimer comprises a polypeptide that is at least 70%, 75%, 80%, 85%, 90%, 91%, 92%, 93%, 94%, 95%, 95%, 96%, 97%, 98%, 99%, or 100% identical to a polypeptide that begins at any one of amino acids of 21-28 of SEQ ID NO: 589 and ends at any one of amino acids 380-786 of SEQ ID NO: 589. In some embodiments, a betaglycan:ActRIIA heteromultimer comprises a polypeptide that is at least 70%, 75%, 80%, 85%, 90%, 91%, 92%, 93%, 94%, 95%, 95%, 96%, 97%, 98%, 99%, or 100% identical to the amino acid sequence of any one of SEQ ID NOs: 9, 10, and 11. In some embodiments, a betaglycan:ActRIIA heteromultimer comprises a polypeptide that is at least 70%, 75%, 80%, 85%, 90%, 91%, 92%, 93%, 94%, 95%, 95%, 96%, 97%, 98%, 99%, or 100% identical to a polypeptide that begins at any one of amino acids of 21-30 of SEQ ID NO: 9, and ends at any one of amino acids 110-135 of SEQ ID NO: 9. In certain preferred embodiments, betaglycan:ActRIIA heteromultimers are soluble. In some embodiments, a betaglycan:ActRIIA heteromultimer of the disclosure binds to one or more TGF-beta superfamily ligands (e.g., binds to one or more TGF-beta superfamily ligands with a K_{D} of at least 1×10⁻⁷). In some embodiments, a betaglycan:ActRIIA heteromultimer of the disclosure inhibits one or more TGF-beta superfamily ligands (e.g., inhibits Smad signaling). Heteromultimer-ligand binding and inhibition may be determined using a variety of assays including, for example, those described herein (e.g., in vitro binding and/or cell-based signaling assays). In some embodiments, a betaglycan:ActRIIA heteromultimer of the disclosure has a different TGF-beta ligand binding and/or inhibition profile (specificity) compared to a corresponding homomultimer (e.g., betaglycan and ActRIIA homomultimers). In some embodiments, a betaglycan:ActRIIA heteromultimer of the disclosure is a heterodimer.

[0096] In certain aspects, the disclosure relates to heteromultimers that comprise at least one betaglycan polypeptide, which includes fragments, functional variants, and modified forms thereof, and at least one ActRIIB polypeptide, which includes fragments, functional variants, and modified forms thereof. In some embodiments, the betaglycan:ActRIIB heteromultimer comprises a polypeptide that is at least 70%, 75%, 80%, 85%, 90%, 91%, 92%, 93%, 94%, 95%, 95%, 96%, 97%, 98%, 99%, or 100% identical to the amino acid sequence of any one of SEQ ID NOs: 585, 586, 589, or 590. In some embodiments, the betaglycan:ActRIIB heteromultimer comprises a polypeptide that is at least 70%, 75%, 80%, 85%, 90%, 91%, 92%, 93%, 94%, 95%, 95%, 96%, 97%, 98%, 99%, or 100% identical to a polypeptide that begins at any one of amino acids of 21-28 of SEQ ID NO: 585 and ends at any one of amino acids 381-787 of SEQ ID NO: 585. In some embodiments, the betaglycan:ActRIIB heteromultimer comprises a polypeptide that is at least 70%, 75%, 80%, 85%, 90%, 91%, 92%, 93%, 94%, 95%, 95%, 96%, 97%, 98%, 99%, or 100% identical to a polypeptide that begins at any one of amino acids of 21-28 of SEQ ID NO: 589 and ends at any one of amino acids 380-786 of SEQ ID NO: 589. In some embodiments, a betaglycan:ActRIIB heteromultimer comprises a polypeptide that is at least 70%, 75%, 80%, 85%, 90%, 91%, 92%, 93%, 94%, 95%, 95%, 96%, 97%, 98%, 99%, or 100% identical to the amino acid sequence of any one of SEQ ID NOs: 1, 2, 3, 4, 5, and 6. In some embodiments, a betaglycan:ActRIIB heteromultimer comprises a polypeptide that is at least 70%, 75%, 80%, 85%, 90%, 91%, 92%, 93%, 94%, 95%, 95%, 96%, 97%, 98%, 99%, or 100% identical to a polypeptide that begins at any one of amino acids 20-29 of SEQ ID NO: 1 and ends at a position corresponding to any one of amino acids 109-134 of SEQ ID NO: 1. In some embodiments, a betaglycan:ActRIIB heteromultimer comprises an ActRIIB polypeptide wherein the amino acid position corresponding to L79 of SEQ ID NO: 1 is not an acidic amino acid. In certain preferred embodiments, betaglycan:ActRIIB heteromultimers are soluble. In some embodiments, a betaglycan:ActRIIB heteromultimer of the disclosure binds to one or more TGF-beta superfamily ligands (e.g., binds to one or more TGF-beta superfamily ligands with a K_{D} of at least 1×10⁻⁷). In some embodiments, a betaglycan:ActRIIB heteromultimer of the disclosure inhibits one or more TGF-beta superfamily ligands (e.g., inhibits Smad signaling). Heteromultimer-ligand binding and inhibition may be determined using a variety of assays including, for example, those described herein (e.g., in vitro binding and/or cell-based signaling assays). In some embodiments, a betaglycan:ActRIIB heteromultimer of the disclosure has a different TGF-beta ligand binding and/or inhibition profile (specificity) compared to a corresponding homomultimer (e.g., betaglycan and ActRIIB homomultimers). In some embodiments, a betaglycan:ActRIIB heteromultimer of the disclosure is a heterodimer.

[0097] In certain aspects, the disclosure relates to heteromultimers that comprise at least one betaglycan polypeptide, which includes fragments, functional variants, and modified forms thereof, and at least one TGFBRII polypeptide, which includes fragments, functional variants, and modified forms thereof. In some embodiments, the betaglycan:TGFBRII heteromultimer comprises a polypeptide that is at least 70%, 75%, 80%, 85%, 90%, 91%, 92%, 93%, 94%, 95%, 95%, 96%, 97%, 98%, 99%, or 100% identical to the amino acid sequence of any one of SEQ ID NOs: 585, 586, 589, or 590. In some embodiments, the betaglycan:TGFBRII heteromultimer comprises a polypeptide that is at least 70%, 75%, 80%, 85%, 90%, 91%, 92%, 93%, 94%, 95%, 95%, 96%, 97%, 98%, 99%, or 100% identical to a polypeptide that begins at any one of amino acids of 21-28 of SEQ ID NO: 585 and ends at any one of amino acids 381-787 of SEQ ID NO: 585. In some embodiments, the betaglycan:TGFBRII heteromultimer comprises a polypeptide that is at least 70%, 75%, 80%, 85%, 90%, 91%, 92%, 93%, 94%, 95%, 95%, 96%, 97%, 98%, 99%, or 100% identical to a polypeptide that begins at any one of amino acids of 21-28 of SEQ ID NO: 589 and ends at any one of amino acids 380-786 of SEQ ID NO: 589. In some embodiments, a betaglycan:TGFBRII heteromultimer comprises a polypeptide that is at least 70%, 75%, 80%, 85%, 90%, 91%, 92%, 93%, 94%, 95%, 95%, 96%, 97%, 98%, 99%, or 100% identical to the amino acid sequence of any one of SEQ ID NOs: 42, 43, 67, or 68. In some embodiments, a betaglycan:TGFBRII heteromultimer comprises a polypeptide that is at least 70%, 75%, 80%, 85%, 90%, 91%, 92%, 93%, 94%, 95%, 95%, 96%, 97%, 98%, 99%, or 100% identical to a polypeptide that begins at any one of amino acids of 23-51 of SEQ ID NO: 42 and ends at any one of amino acids 143-166 of SEQ ID NO: 42. In some embodiments, a betaglycan:TGFBRII heteromultimer comprises a polypeptide that is at least 70%, 75%, 80%, 85%, 90%, 91%, 92%, 93%, 94%, 95%, 95%, 96%, 97%, 98%, 99%, or 100% identical to a polypeptide that begins at any one of amino acids of 23-44 of SEQ ID NO: 67 and ends at any one of amino acids 168-191 of SEQ ID NO: 67. In certain preferred embodiments, betaglycan:TGFBRII heteromultimers are soluble. In some embodiments, a betaglycan:TGFBRII heteromultimer of the disclosure binds to one or more TGF-beta superfamily ligands (e.g., binds to one or more TGF-beta superfamily ligands with a K_{D} of at least 1×10⁻⁷). In some embodiments, a betaglycan:TGFBRII heteromultimer of the disclosure inhibits one or more TGF-beta superfamily ligands (e.g., inhibits Smad signaling). Heteromultimer-ligand binding and inhibition may be determined using a variety of assays including, for example, those described herein (e.g., in vitro binding and/or cell-based signaling assays). In some embodiments, a betaglycan:TGFBRII heteromultimer of the disclosure has a different TGF-beta ligand binding and/or inhibition profile (specificity) compared to a corresponding homomultimer (e.g., betaglycan and TGFBRII homomultimers). In some embodiments, a betaglycan:TGFBRII heteromultimer of the disclosure is a heterodimer.

[0098] In certain aspects, the disclosure relates to heteromultimers that comprise at least one betaglycan polypeptide, which includes fragments, functional variants, and modified forms thereof, and at least one BMPRII polypeptide, which includes fragments, functional variants, and modified forms thereof. In some embodiments, the betaglycan:BMPRII heteromultimer comprises a polypeptide that is at least 70%, 75%, 80%, 85%, 90%, 91%, 92%, 93%, 94%, 95%, 95%, 96%, 97%, 98%, 99%, or 100% identical to the amino acid sequence of any one of SEQ ID NOs: 585, 586, 589, or 590. In some embodiments, the betaglycan:BMPRII heteromultimer comprises a polypeptide that is at least 70%, 75%, 80%, 85%, 90%, 91%, 92%, 93%, 94%, 95%, 95%, 96%, 97%, 98%, 99%, or 100% identical to a polypeptide that begins at any one of amino acids of 21-28 of SEQ ID NO: 585 and ends at any one of amino acids 381-787 of SEQ ID NO: 585. In some embodiments, the betaglycan:BMPRII heteromultimer comprises a polypeptide that is at least 70%, 75%, 80%, 85%, 90%, 91%, 92%, 93%, 94%, 95%, 95%, 96%, 97%, 98%, 99%, or 100% identical to a polypeptide that begins at any one of amino acids of 21-28 of SEQ ID NO: 589 and ends at any one of amino acids 380-786 of SEQ ID NO: 589. In some embodiments, a betaglycan:BMPRII heteromultimer comprises a polypeptide that is at least 70%, 75%, 80%, 85%, 90%, 91%, 92%, 93%, 94%, 95%, 95%, 96%, 97%, 98%, 99%, or 100% identical to the amino acid sequence of any one of SEQ ID NOs: 46, 47, 71, or 72. In some embodiments, a betaglycan:BMPRII heteromultimer comprises a polypeptide that is at least 70%, 75%, 80%, 85%, 90%, 91%, 92%, 93%, 94%, 95%, 95%, 96%, 97%, 98%, 99%, or 100% identical to a polypeptide that begins at any one of amino acids of 27-34 of SEQ ID NO: 46 and ends at any one of amino acids 123-150 of SEQ ID NO: 46. In some embodiments, a betaglycan:BMPRII heteromultimer comprises a polypeptide that is at least 70%, 75%, 80%, 85%, 90%, 91%, 92%, 93%, 94%, 95%, 95%, 96%, 97%, 98%, 99%, or 100% identical to a polypeptide that begins at any one of amino acids of 27-34 of SEQ ID NO: 71 and ends at any one of amino acids 123-150 of SEQ ID NO: 71. In certain preferred embodiments, betaglycan:BMPRII heteromultimers are soluble. In some embodiments, a betaglycan:BMPRII heteromultimer of the disclosure binds to one or more TGF-beta superfamily ligands (e.g., binds to one or more TGF-beta superfamily ligands with a K_{D} of at least 1×10⁻⁷). In some embodiments, a betaglycan:BMPRII heteromultimer of the disclosure inhibits one or more TGF-beta superfamily ligands (e.g., inhibits Smad signaling). Heteromultimer-ligand binding and inhibition may be determined using a variety of assays including, for example, those described herein (e.g., in vitro binding and/or cell-based signaling assays). In some embodiments, a betaglycan:BMPRII heteromultimer of the disclosure has a different TGF-beta ligand binding and/or inhibition profile (specificity) compared to a corresponding homomultimer (e.g., betaglycan and BMPRII homomultimers). In some embodiments, a betaglycan:BMPRII heteromultimer of the disclosure is a heterodimer.

[0099] In certain aspects, the disclosure relates to heteromultimers that comprise at least one betaglycan polypeptide, which includes fragments, functional variants, and modified forms thereof, and at least one MISRII polypeptide, which includes fragments, functional variants, and modified forms thereof. In some embodiments, the betaglycan:MISRII heteromultimer comprises a polypeptide that is at least 70%, 75%, 80%, 85%, 90%, 91%, 92%, 93%, 94%, 95%, 95%, 96%, 97%, 98%, 99%, or 100% identical to the amino acid sequence of any one of SEQ ID NOs: 585, 586, 589, or 590. In some embodiments, the betaglycan:MISRII heteromultimer comprises a polypeptide that is at least 70%, 75%, 80%, 85%, 90%, 91%, 92%, 93%, 94%, 95%, 95%, 96%, 97%, 98%, 99%, or 100% identical to a polypeptide that begins at any one of amino acids of 21-28 of SEQ ID NO: 585 and ends at any one of amino acids 381-787 of SEQ ID NO: 585. In some embodiments, the betaglycan:MISRII heteromultimer comprises a polypeptide that is at least 70%, 75%, 80%, 85%, 90%, 91%, 92%, 93%, 94%, 95%, 95%, 96%, 97%, 98%, 99%, or 100% identical to a polypeptide that begins at any one of amino acids of 21-28 of SEQ ID NO: 589 and ends at any one of amino acids 380-786 of SEQ ID NO: 589. In some embodiments, a betaglycan:MISRII heteromultimer comprises a polypeptide that is at least 70%, 75%, 80%, 85%, 90%, 91%, 92%, 93%, 94%, 95%, 95%, 96%, 97%, 98%, 99%, or 100% identical to the amino acid sequence of any one of SEQ ID NOs: 50, 51, 75, 76, 79, or 80. In some embodiments, a betaglycan:MISRII heteromultimer comprises a polypeptide that is at least 70%, 75%, 80%, 85%, 90%, 91%, 92%, 93%, 94%, 95%, 95%, 96%, 97%, 98%, 99%, or 100% identical to a polypeptide that begins at any one of amino acids of 17-24 of SEQ ID NO: 50 and ends at any one of amino acids 116-149 of SEQ ID NO: 50. In some embodiments, a betaglycan:MISRII heteromultimer comprises a polypeptide that is at least 70%, 75%, 80%, 85%, 90%, 91%, 92%, 93%, 94%, 95%, 95%, 96%, 97%, 98%, 99%, or 100% identical to a polypeptide that begins at any one of amino acids of 17-24 of SEQ ID NO: 75 and ends at any one of amino acids 116-149 of SEQ ID NO: 75. In some embodiments, a betaglycan:MISRII heteromultimer comprises a polypeptide that is at least 70%, 75%, 80%, 85%, 90%, 91%, 92%, 93%, 94%, 95%, 95%, 96%, 97%, 98%, 99%, or 100% identical to a polypeptide that begins at any one of amino acids of 17-24 of SEQ ID NO: 50 and ends at any one of amino acids 116-149 of SEQ ID NO: 79. In certain preferred embodiments, betaglycan:MISRII heteromultimers are soluble. In some embodiments, a betaglycan:MISRII heteromultimer of the disclosure binds to one or more TGF-beta superfamily ligands (e.g., binds to one or more TGF-beta superfamily ligands with a K_{D} of at least 1×10⁻⁷). In some embodiments, a betaglycan:MISRII heteromultimer of the disclosure inhibits one or more TGF-beta superfamily ligands (e.g., inhibits Smad signaling). Heteromultimer-ligand binding and inhibition may be determined using a variety of assays including, for example, those described herein (e.g., in vitro binding and/or cell-based signaling assays). In some embodiments, a betaglycan:MISRII heteromultimer of the disclosure has a different TGF-beta ligand binding and/or inhibition profile (specificity) compared to a corresponding homomultimer (e.g., betaglycan and MISRII homomultimers). In some embodiments, a betaglycan:MISRII heteromultimer of the disclosure is a heterodimer.

[0100] In certain aspects, the disclosure relates to heteromultimers that comprise at least one Cripto-1 polypeptide, which includes fragments, functional variants, and modified forms thereof, and at least one ActRIIA polypeptide, which includes fragments, functional variants, and modified forms thereof. In some embodiments, the Cripto-1:ActRIIA heteromultimer comprises a polypeptide that is at least 70%, 75%, 80%, 85%, 90%, 91%, 92%, 93%, 94%, 95%, 95%, 96%, 97%, 98%, 99%, or 100% identical to the amino acid sequence of any one of SEQ ID NOs: 513, 514, 517, or 518. In some embodiments, the Cripto-1:ActRIIA heteromultimer comprises a polypeptide that is at least 70%, 75%, 80%, 85%, 90%, 91%, 92%, 93%, 94%, 95%, 95%, 96%, 97%, 98%, 99%, or 100% identical to a polypeptide that begins at any one of amino acids of 31-82 of SEQ ID NO: 513 and ends at any one of amino acids 172-188 of SEQ ID NO: 513. In some embodiments, the Cripto-1:ActRIIA heteromultimer comprises a polypeptide that is at least 70%, 75%, 80%, 85%, 90%, 91%, 92%, 93%, 94%, 95%, 95%, 96%, 97%, 98%, 99%, or 100% identical to a polypeptide that begins at any one of amino acids of 15-66 of SEQ ID NO: 517, and ends at any one of amino acids 156-172 of SEQ ID NO: 517. In some embodiments, a Cripto-1:ActRIIA heteromultimer comprises a polypeptide that is at least 70%, 75%, 80%, 85%, 90%, 91%, 92%, 93%, 94%, 95%, 95%, 96%, 97%, 98%, 99%, or 100% identical to the amino acid sequence of any one of SEQ ID NOs: 9, 10, and 11. In some embodiments, a Cripto-1:ActRIIA heteromultimer comprises a polypeptide that is at least 70%, 75%, 80%, 85%, 90%, 91%, 92%, 93%, 94%, 95%, 95%, 96%, 97%, 98%, 99%, or 100% identical to a polypeptide that begins at any one of amino acids of 21-30 of SEQ ID NO: 9, and ends at any one of amino acids 110-135 of SEQ ID NO: 9. In certain preferred embodiments, Cripto-1:ActRIIA heteromultimers are soluble. In some embodiments, a Cripto-1:ActRIIA heteromultimer of the disclosure binds to one or more TGF-beta superfamily ligands (e.g., binds to one or more TGF-beta superfamily ligands with a K_{D} of at least 1×10⁻⁷). In some embodiments, a Cripto-1:ActRIIA heteromultimer of the disclosure inhibits one or more TGF-beta superfamily ligands (e.g., inhibits Smad signaling). Heteromultimer-ligand binding and inhibition may be determined using a variety of assays including, for example, those described herein (e.g., in vitro binding and/or cell-based signaling assays). In some embodiments, a Cripto-1:ActRIIA heteromultimer of the disclosure has a different TGF-beta ligand binding and/or inhibition profile (specificity) compared to a corresponding homomultimer (e.g., Cripto-1 and ActRIIA homomultimers). In some embodiments, a Cripto-1:ActRIIA heteromultimer of the disclosure is a heterodimer.

[0101] In certain aspects, the disclosure relates to heteromultimers that comprise at least one Cripto-1 polypeptide, which includes fragments, functional variants, and modified forms thereof, and at least one ActRIIB polypeptide, which includes fragments, functional variants, and modified forms thereof. In some embodiments, the Cripto-1:ActRIIB heteromultimer comprises a polypeptide that is at least 70%, 75%, 80%, 85%, 90%, 91%, 92%, 93%, 94%, 95%, 95%, 96%, 97%, 98%, 99%, or 100% identical to the amino acid sequence of any one of SEQ ID NOs: 513, 514, 517, or 518. In some embodiments, the Cripto-1:ActRIIB heteromultimer comprises a polypeptide that is at least 70%, 75%, 80%, 85%, 90%, 91%, 92%, 93%, 94%, 95%, 95%, 96%, 97%, 98%, 99%, or 100% identical to a polypeptide that begins at any one of amino acids of 31-82 of SEQ ID NO: 513 and ends at any one of amino acids 172-188 of SEQ ID NO: 513. In some embodiments, the Cripto-1:ActRIIB heteromultimer comprises a polypeptide that is at least 70%, 75%, 80%, 85%, 90%, 91%, 92%, 93%, 94%, 95%, 95%, 96%, 97%, 98%, 99%, or 100% identical to a polypeptide that begins at any one of amino acids of 15-66 of SEQ ID NO: 517, and ends at any one of amino acids 156-172 of SEQ ID NO: 517. In some embodiments, a Cripto-1:ActRIIB heteromultimer comprises a polypeptide that is at least 70%, 75%, 80%, 85%, 90%, 91%, 92%, 93%, 94%, 95%, 95%, 96%, 97%, 98%, 99%, or 100% identical to the amino acid sequence of any one of SEQ ID NOs: 1, 2, 3, 4, 5, and 6. In some embodiments, a Cripto-1:ActRIIB heteromultimer comprises a polypeptide that is at least 70%, 75%, 80%, 85%, 90%, 91%, 92%, 93%, 94%, 95%, 95%, 96%, 97%, 98%, 99%, or 100% identical to a polypeptide that begins at any one of amino acids 20-29 of SEQ ID NO: 1 and ends at a position corresponding to any one of amino acids 109-134 of SEQ ID NO: 1. In some embodiments, a Cripto-1:ActRIIB heteromultimer comprises an ActRIIB polypeptide wherein the amino acid position corresponding to L79 of SEQ ID NO: 1 is not an acidic amino acid. In some embodiments, a Cripto-1:ActRIIB heteromultimer comprises a polypeptide that is at least 70%, 75%, 80%, 85%, 90%, 91%, 92%, 93%, 94%, 95%, 95%, 96%, 97%, 98%, 99%, or 100% identical to the amino acid sequence of any one of SEQ ID NOs: 1, 2, 3, 4, 5, and 6. In some embodiments, a Cripto-1:ActRIIB heteromultimer comprises a polypeptide that is at least 70%, 75%, 80%, 85%, 90%, 91%, 92%, 93%, 94%, 95%, 95%, 96%, 97%, 98%, 99%, or 100% identical to a polypeptide that begins at any one of amino acids 20-29 of SEQ ID NO: 1 and ends at a position corresponding to any one of amino acids 109-134 of SEQ ID NO: 1. In some embodiments, a Cripto-1:ActRIIB heteromultimer comprises an ActRIIB polypeptide wherein the amino acid position corresponding to L79 of SEQ ID NO: 1 is not an acidic amino acid. In certain preferred embodiments, Cripto-1:ActRIIB heteromultimers are soluble. In some embodiments, a Cripto-1:ActRIIB heteromultimer of the disclosure binds to one or more TGF-beta superfamily ligands (e.g., binds to one or more TGF-beta superfamily ligands with a K_{D} of at least 1×10⁻⁷). In some embodiments, a Cripto-1:ActRIIB heteromultimer of the disclosure inhibits one or more TGF-beta superfamily ligands (e.g., inhibits Smad signaling). Heteromultimer-ligand binding and inhibition may be determined using a variety of assays including, for example, those described herein (e.g., in vitro binding and/or cell-based signaling assays). In some embodiments, a Cripto-1:ActRIIB heteromultimer of the disclosure has a different TGF-beta ligand binding and/or inhibition profile (specificity) compared to a corresponding homomultimer (e.g., Cripto-1 and ActRIIB homomultimers). In some embodiments, a Cripto-1:ActRIIB heteromultimer of the disclosure is a heterodimer.

[0102] In certain aspects, the disclosure relates to heteromultimers that comprise at least one Cripto-1 polypeptide, which includes fragments, functional variants, and modified forms thereof, and at least one TGFBRII polypeptide, which includes fragments, functional variants, and modified forms thereof. In some embodiments, the Cripto-1:TGFBRII heteromultimer comprises a polypeptide that is at least 70%, 75%, 80%, 85%, 90%, 91%, 92%, 93%, 94%, 95%, 95%, 96%, 97%, 98%, 99%, or 100% identical to the amino acid sequence of any one of SEQ ID NOs: 513, 514, 517, or 518. In some embodiments, the Cripto-1:TGFBRII heteromultimer comprises a polypeptide that is at least 70%, 75%, 80%, 85%, 90%, 91%, 92%, 93%, 94%, 95%, 95%, 96%, 97%, 98%, 99%, or 100% identical to a polypeptide that begins at any one of amino acids of 31-82 of SEQ ID NO: 513 and ends at any one of amino acids 172-188 of SEQ ID NO: 513. In some embodiments, the Cripto-1:TGFBRII heteromultimer comprises a polypeptide that is at least 70%, 75%, 80%, 85%, 90%, 91%, 92%, 93%, 94%, 95%, 95%, 96%, 97%, 98%, 99%, or 100% identical to a polypeptide that begins at any one of amino acids of 15-66 of SEQ ID NO: 517, and ends at any one of amino acids 156-172 of SEQ ID NO: 517. In some embodiments, a Cripto-1:TGFBRII heteromultimer comprises a polypeptide that is at least 70%, 75%, 80%, 85%, 90%, 91%, 92%, 93%, 94%, 95%, 95%, 96%, 97%, 98%, 99%, or 100% identical to the amino acid sequence of any one of SEQ ID NOs: 42, 43, 67, or 68. In some embodiments, a Cripto-1:TGFBRII heteromultimer comprises a polypeptide that is at least 70%, 75%, 80%, 85%, 90%, 91%, 92%, 93%, 94%, 95%, 95%, 96%, 97%, 98%, 99%, or 100% identical to a polypeptide that begins at any one of amino acids of 23-51 of SEQ ID NO: 42 and ends at any one of amino acids 143-166 of SEQ ID NO: 42. In some embodiments, a Cripto-1:TGFBRII heteromultimer comprises a polypeptide that is at least 70%, 75%, 80%, 85%, 90%, 91%, 92%, 93%, 94%, 95%, 95%, 96%, 97%, 98%, 99%, or 100% identical to a polypeptide that begins at any one of amino acids of 23-44 of SEQ ID NO: 67 and ends at any one of amino acids 168-191 of SEQ ID NO: 67. In certain preferred embodiments, Cripto-1:TGFBRII heteromultimers are soluble. In some embodiments, a Cripto-1:TGFBRII heteromultimer of the disclosure binds to one or more TGF-beta superfamily ligands (e.g., binds to one or more TGF-beta superfamily ligands with a K_{D} of at least 1×10⁻⁷). In some embodiments, a Cripto-1:TGFBRII heteromultimer of the disclosure inhibits one or more TGF-beta superfamily ligands (e.g., inhibits Smad signaling). Heteromultimer-ligand binding and inhibition may be determined using a variety of assays including, for example, those described herein (e.g., in vitro binding and/or cell-based signaling assays). In some embodiments, a Cripto-1:TGFBRII heteromultimer of the disclosure has a different TGF-beta ligand binding and/or inhibition profile (specificity) compared to a corresponding homomultimer (e.g., Cripto-1 and TGFBRII homomultimers). In some embodiments, a Cripto-1:TGFBRII heteromultimer of the disclosure is a heterodimer.

[0103] In certain aspects, the disclosure relates to heteromultimers that comprise at least one Cripto-1 polypeptide, which includes fragments, functional variants, and modified forms thereof, and at least one BMPRII polypeptide, which includes fragments, functional variants, and modified forms thereof. In some embodiments, the Cripto-1:BMPRII heteromultimer comprises a polypeptide that is at least 70%, 75%, 80%, 85%, 90%, 91%, 92%, 93%, 94%, 95%, 95%, 96%, 97%, 98%, 99%, or 100% identical to the amino acid sequence of any one of SEQ ID NOs: 513, 514, 517, or 518. In some embodiments, the Cripto-1:BMPRII heteromultimer comprises a polypeptide that is at least 70%, 75%, 80%, 85%, 90%, 91%, 92%, 93%, 94%, 95%, 95%, 96%, 97%, 98%, 99%, or 100% identical to a polypeptide that begins at any one of amino acids of 31-82 of SEQ ID NO: 513 and ends at any one of amino acids 172-188 of SEQ ID NO: 513. In some embodiments, the Cripto-1:BMPRII heteromultimer comprises a polypeptide that is at least 70%, 75%, 80%, 85%, 90%, 91%, 92%, 93%, 94%, 95%, 95%, 96%, 97%, 98%, 99%, or 100% identical to a polypeptide that begins at any one of amino acids of 15-66 of SEQ ID NO: 517, and ends at any one of amino acids 156-172 of SEQ ID NO: 517. In some embodiments, a Cripto-1:BMPRII heteromultimer comprises a polypeptide that is at least 70%, 75%, 80%, 85%, 90%, 91%, 92%, 93%, 94%, 95%, 95%, 96%, 97%, 98%, 99%, or 100% identical to the amino acid sequence of any one of SEQ ID NOs: 46, 47, 71, or 72. In some embodiments, a Cripto-1:BMPRII heteromultimer comprises a polypeptide that is at least 70%, 75%, 80%, 85%, 90%, 91%, 92%, 93%, 94%, 95%, 95%, 96%, 97%, 98%, 99%, or 100% identical to a polypeptide that begins at any one of amino acids of 27-34 of SEQ ID NO: 46 and ends at any one of amino acids 123-150 of SEQ ID NO: 46. In some embodiments, a Cripto-1:BMPRII heteromultimer comprises a polypeptide that is at least 70%, 75%, 80%, 85%, 90%, 91%, 92%, 93%, 94%, 95%, 95%, 96%, 97%, 98%, 99%, or 100% identical to a polypeptide that begins at any one of amino acids of 27-34 of SEQ ID NO: 71 and ends at any one of amino acids 123-150 of SEQ ID NO: 71. In certain preferred embodiments, Cripto-1:BMPRII heteromultimers are soluble. In some embodiments, a Cripto-1:BMPRII heteromultimer of the disclosure binds to one or more TGF-beta superfamily ligands (e.g., binds to one or more TGF-beta superfamily ligands with a K_{D} of at least 1×10⁻⁷). In some embodiments, a Cripto-1:BMPRII heteromultimer of the disclosure inhibits one or more TGF-beta superfamily ligands (e.g., inhibits Smad signaling). Heteromultimer-ligand binding and inhibition may be determined using a variety of assays including, for example, those described herein (e.g., in vitro binding and/or cell-based signaling assays). In some embodiments, a Cripto-1:BMPRII heteromultimer of the disclosure has a different TGF-beta ligand binding and/or inhibition profile (specificity) compared to a corresponding homomultimer (e.g., Cripto-1 and BMPRII homomultimers). In some embodiments, a Cripto-1:BMPRII heteromultimer of the disclosure is a heterodimer.

[0104] In certain aspects, the disclosure relates to heteromultimers that comprise at least one Cripto-1 polypeptide, which includes fragments, functional variants, and modified forms thereof, and at least one MISRII polypeptide, which includes fragments, functional variants, and modified forms thereof. In some embodiments, the Cripto-1:MISRII heteromultimer comprises a polypeptide that is at least 70%, 75%, 80%, 85%, 90%, 91%, 92%, 93%, 94%, 95%, 95%, 96%, 97%, 98%, 99%, or 100% identical to the amino acid sequence of any one of SEQ ID NOs: 513, 514, 517, or 518. In some embodiments, the Cripto-1:MISRII heteromultimer comprises a polypeptide that is at least 70%, 75%, 80%, 85%, 90%, 91%, 92%, 93%, 94%, 95%, 95%, 96%, 97%, 98%, 99%, or 100% identical to a polypeptide that begins at any one of amino acids of 31-82 of SEQ ID NO: 513 and ends at any one of amino acids 172-188 of SEQ ID NO: 513. In some embodiments, the Cripto-1:MISRII heteromultimer comprises a polypeptide that is at least 70%, 75%, 80%, 85%, 90%, 91%, 92%, 93%, 94%, 95%, 95%, 96%, 97%, 98%, 99%, or 100% identical to a polypeptide that begins at any one of amino acids of 15-66 of SEQ ID NO: 517, and ends at any one of amino acids 156-172 of SEQ ID NO: 517. In some embodiments, a Cripto-1:MISRII heteromultimer comprises a polypeptide that is at least 70%, 75%, 80%, 85%, 90%, 91%, 92%, 93%, 94%, 95%, 95%, 96%, 97%, 98%, 99%, or 100% identical to the amino acid sequence of any one of SEQ ID NOs: 50, 51, 75, 76, 79, or 80. In some embodiments, a Cripto-1:MISRII heteromultimer comprises a polypeptide that is at least 70%, 75%, 80%, 85%, 90%, 91%, 92%, 93%, 94%, 95%, 95%, 96%, 97%, 98%, 99%, or 100% identical to a polypeptide that begins at any one of amino acids of 17-24 of SEQ ID NO: 50 and ends at any one of amino acids 116-149 of SEQ ID NO: 50. In some embodiments, a Cripto-1:MISRII heteromultimer comprises a polypeptide that is at least 70%, 75%, 80%, 85%, 90%, 91%, 92%, 93%, 94%, 95%, 95%, 96%, 97%, 98%, 99%, or 100% identical to a polypeptide that begins at any one of amino acids of 17-24 of SEQ ID NO: 75 and ends at any one of amino acids 116-149 of SEQ ID NO: 75. In some embodiments, a Cripto-1:MISRII heteromultimer comprises a polypeptide that is at least 70%, 75%, 80%, 85%, 90%, 91%, 92%, 93%, 94%, 95%, 95%, 96%, 97%, 98%, 99%, or 100% identical to a polypeptide that begins at any one of amino acids of 17-24 of SEQ ID NO: 50 and ends at any one of amino acids 116-149 of SEQ ID NO: 79. In certain preferred embodiments, Cripto-1:MISRII heteromultimers are soluble. In some embodiments, a Cripto-1:MISRII heteromultimer of the disclosure binds to one or more TGF-beta superfamily ligands (e.g., binds to one or more TGF-beta superfamily ligands with a K_{D} of at least 1×10⁻⁷). In some embodiments, a Cripto-1:MISRII heteromultimer of the disclosure inhibits one or more TGF-beta superfamily ligands (e.g., inhibits Smad signaling). Heteromultimer-ligand binding and inhibition may be determined using a variety of assays including, for example, those described herein (e.g., in vitro binding and/or cell-based signaling assays). In some embodiments, a Cripto-1:MISRII heteromultimer of the disclosure has a different TGF-beta ligand binding and/or inhibition profile (specificity) compared to a corresponding homomultimer (e.g., Cripto-1 and MISRII homomultimers). In some embodiments, a Cripto-1:MISRII heteromultimer of the disclosure is a heterodimer.

[0105] In certain aspects, the disclosure relates to heteromultimers that comprise at least one Cryptic protein polypeptide, which includes fragments, functional variants, and modified forms thereof, and at least one ActRIIA polypeptide, which includes fragments, functional variants, and modified forms thereof. In some embodiments, the Cryptic protein:ActRIIA heteromultimer comprises a polypeptide that is at least 70%, 75%, 80%, 85%, 90%, 91%, 92%, 93%, 94%, 95%, 95%, 96%, 97%, 98%, 99%, or 100% identical to the amino acid sequence of any one of SEQ ID NOs: 521, 522, 525, 526, 529, or 530. In some embodiments, the Cryptic protein:ActRIIA heteromultimer comprises a polypeptide that is at least 70%, 75%, 80%, 85%, 90%, 91%, 92%, 93%, 94%, 95%, 95%, 96%, 97%, 98%, 99%, or 100% identical to a polypeptide that begins at any one of amino acids of 26-90 of SEQ ID NO: 521 and ends at any one of amino acids 157-233 of SEQ ID NO: 521. In some embodiments, the Cryptic protein:ActRIIA heteromultimer comprises a polypeptide that is at least 70%, 75%, 80%, 85%, 90%, 91%, 92%, 93%, 94%, 95%, 95%, 96%, 97%, 98%, 99%, or 100% identical to a polypeptide that begins at any one of amino acids of 26-30 of SEQ ID NO: 525 and ends at any one of amino acids 82-191 of SEQ ID NO: 525. In some embodiments, the Cryptic protein:ActRIIA heteromultimer comprises a polypeptide that is at least 70%, 75%, 80%, 85%, 90%, 91%, 92%, 93%, 94%, 95%, 95%, 96%, 97%, 98%, 99%, or 100% identical to a polypeptide that begins at any one of amino acids of 26-30 of SEQ ID NO: 529, and ends at any one of amino acids 82-148 of SEQ ID NO: 529. In some embodiments, a Cryptic protein:ActRIIA heteromultimer comprises a polypeptide that is at least 70%, 75%, 80%, 85%, 90%, 91%, 92%, 93%, 94%, 95%, 95%, 96%, 97%, 98%, 99%, or 100% identical to the amino acid sequence of any one of SEQ ID NOs: 9, 10, and 11. In some embodiments, a Cryptic protein:ActRIIA heteromultimer comprises a polypeptide that is at least 70%, 75%, 80%, 85%, 90%, 91%, 92%, 93%, 94%, 95%, 95%, 96%, 97%, 98%, 99%, or 100% identical to a polypeptide that begins at any one of amino acids of 21-30 of SEQ ID NO: 9, and ends at any one of amino acids 110-135 of SEQ ID NO: 9. In certain preferred embodiments, Cryptic protein:ActRIIA heteromultimers are soluble. In some embodiments, a Cryptic protein:ActRIIA heteromultimer of the disclosure binds to one or more TGF-beta superfamily ligands (e.g., binds to one or more TGF-beta superfamily ligands with a K_{D} of at least 1×10⁻⁷). In some embodiments, a Cryptic protein:ActRIIA heteromultimer of the disclosure inhibits one or more TGF-beta superfamily ligands (e.g., inhibits Smad signaling). Heteromultimer-ligand binding and inhibition may be determined using a variety of assays including, for example, those described herein (e.g., in vitro binding and/or cell-based signaling assays). In some embodiments, a Cryptic protein:ActRIIA heteromultimer of the disclosure has a different TGF-beta ligand binding and/or inhibition profile (specificity) compared to a corresponding homomultimer (e.g., Cryptic protein and ActRIIA homomultimers). In some embodiments, a Cryptic protein:ActRIIA heteromultimer of the disclosure is a heterodimer.

[0106] In certain aspects, the disclosure relates to heteromultimers that comprise at least one Cryptic protein polypeptide, which includes fragments, functional variants, and modified forms thereof, and at least one ActRIIB polypeptide, which includes fragments, functional variants, and modified forms thereof. In some embodiments, the Cryptic protein:ActRIIB heteromultimer comprises a polypeptide that is at least 70%, 75%, 80%, 85%, 90%, 91%, 92%, 93%, 94%, 95%, 95%, 96%, 97%, 98%, 99%, or 100% identical to the amino acid sequence of any one of SEQ ID NOs: 521, 522, 525, 526, 529, or 530. In some embodiments, the Cryptic protein:ActRIIB heteromultimer comprises a polypeptide that is at least 70%, 75%, 80%, 85%, 90%, 91%, 92%, 93%, 94%, 95%, 95%, 96%, 97%, 98%, 99%, or 100% identical to a polypeptide that begins at any one of amino acids of 26-90 of SEQ ID NO: 521 and ends at any one of amino acids 157-233 of SEQ ID NO: 521. In some embodiments, the Cryptic protein:ActRIIB heteromultimer comprises a polypeptide that is at least 70%, 75%, 80%, 85%, 90%, 91%, 92%, 93%, 94%, 95%, 95%, 96%, 97%, 98%, 99%, or 100% identical to a polypeptide that begins at any one of amino acids of 26-30 of SEQ ID NO: 525 and ends at any one of amino acids 82-191 of SEQ ID NO: 525. In some embodiments, the Cryptic protein:ActRIIB heteromultimer comprises a polypeptide that is at least 70%, 75%, 80%, 85%, 90%, 91%, 92%, 93%, 94%, 95%, 95%, 96%, 97%, 98%, 99%, or 100% identical to a polypeptide that begins at any one of amino acids of 26-30 of SEQ ID NO: 529, and ends at any one of amino acids 82-148 of SEQ ID NO: 529. In some embodiments, a Cryptic protein:ActRIIB heteromultimer comprises a polypeptide that is at least 70%, 75%, 80%, 85%, 90%, 91%, 92%, 93%, 94%, 95%, 95%, 96%, 97%, 98%, 99%, or 100% identical to the amino acid sequence of any one of SEQ ID NOs: 1, 2, 3, 4, 5, and 6. In some embodiments, a Cryptic protein:ActRIIB heteromultimer comprises a polypeptide that is at least 70%, 75%, 80%, 85%, 90%, 91%, 92%, 93%, 94%, 95%, 95%, 96%, 97%, 98%, 99%, or 100% identical to a polypeptide that begins at any one of amino acids 20-29 of SEQ ID NO: 1 and ends at a position corresponding to any one of amino acids 109-134 of SEQ ID NO: 1. In some embodiments, a Cryptic protein:ActRIIB heteromultimer comprises an ActRIIB polypeptide wherein the amino acid position corresponding to L79 of SEQ ID NO: 1 is not an acidic amino acid. In certain preferred embodiments, Cryptic protein:ActRIIB heteromultimers are soluble. In some embodiments, a Cryptic protein:ActRIIB heteromultimer of the disclosure binds to one or more TGF-beta superfamily ligands (e.g., binds to one or more TGF-beta superfamily ligands with a K_{D} of at least 1×10⁻⁷). In some embodiments, a Cryptic protein:ActRIIB heteromultimer of the disclosure inhibits one or more TGF-beta superfamily ligands (e.g., inhibits Smad signaling). Heteromultimer-ligand binding and inhibition may be determined using a variety of assays including, for example, those described herein (e.g., in vitro binding and/or cell-based signaling assays). In some embodiments, a Cryptic protein:ActRIIB heteromultimer of the disclosure has a different TGF-beta ligand binding and/or inhibition profile (specificity) compared to a corresponding homomultimer (e.g., Cryptic protein and ActRIIB homomultimers). In some embodiments, a Cryptic protein:ActRIIB heteromultimer of the disclosure is a heterodimer.

[0107] In certain aspects, the disclosure relates to heteromultimers that comprise at least one Cryptic protein polypeptide, which includes fragments, functional variants, and modified forms thereof, and at least one TGFBRII polypeptide, which includes fragments, functional variants, and modified forms thereof. In some embodiments, the Cryptic protein:TGFBRII heteromultimer comprises a polypeptide that is at least 70%, 75%, 80%, 85%, 90%, 91%, 92%, 93%, 94%, 95%, 95%, 96%, 97%, 98%, 99%, or 100% identical to the amino acid sequence of any one of SEQ ID NOs: 521, 522, 525, 526, 529, or 530. In some embodiments, the Cryptic protein:TGFBRII heteromultimer comprises a polypeptide that is at least 70%, 75%, 80%, 85%, 90%, 91%, 92%, 93%, 94%, 95%, 95%, 96%, 97%, 98%, 99%, or 100% identical to a polypeptide that begins at any one of amino acids of 26-90 of SEQ ID NO: 521 and ends at any one of amino acids 157-233 of SEQ ID NO: 521. In some embodiments, the Cryptic protein:TGFBRII heteromultimer comprises a polypeptide that is at least 70%, 75%, 80%, 85%, 90%, 91%, 92%, 93%, 94%, 95%, 95%, 96%, 97%, 98%, 99%, or 100% identical to a polypeptide that begins at any one of amino acids of 26-30 of SEQ ID NO: 525 and ends at any one of amino acids 82-191 of SEQ ID NO: 525. In some embodiments, the Cryptic protein:TGFBRII heteromultimer comprises a polypeptide that is at least 70%, 75%, 80%, 85%, 90%, 91%, 92%, 93%, 94%, 95%, 95%, 96%, 97%, 98%, 99%, or 100% identical to a polypeptide that begins at any one of amino acids of 26-30 of SEQ ID NO: 529, and ends at any one of amino acids 82-148 of SEQ ID NO: 529. In some embodiments, a Cryptic protein:TGFBRII heteromultimer comprises a polypeptide that is at least 70%, 75%, 80%, 85%, 90%, 91%, 92%, 93%, 94%, 95%, 95%, 96%, 97%, 98%, 99%, or 100% identical to the amino acid sequence of any one of SEQ ID NOs: 42, 43, 67, or 68. In some embodiments, a Cryptic protein:TGFBRII heteromultimer comprises a polypeptide that is at least 70%, 75%, 80%, 85%, 90%, 91%, 92%, 93%, 94%, 95%, 95%, 96%, 97%, 98%, 99%, or 100% identical to a polypeptide that begins at any one of amino acids of 23-51 of SEQ ID NO: 42 and ends at any one of amino acids 143-166 of SEQ ID NO: 42. In some embodiments, a Cryptic protein:TGFBRII heteromultimer comprises a polypeptide that is at least 70%, 75%, 80%, 85%, 90%, 91%, 92%, 93%, 94%, 95%, 95%, 96%, 97%, 98%, 99%, or 100% identical to a polypeptide that begins at any one of amino acids of 23-44 of SEQ ID NO: 67 and ends at any one of amino acids 168-191 of SEQ ID NO: 67. In certain preferred embodiments, Cryptic protein:TGFBRII heteromultimers are soluble. In some embodiments, a Cryptic protein:TGFBRII heteromultimer of the disclosure binds to one or more TGF-beta superfamily ligands (e.g., binds to one or more TGF-beta superfamily ligands with a K_{D} of at least 1×10⁻⁷). In some embodiments, a Cryptic protein:TGFBRII heteromultimer of the disclosure inhibits one or more TGF-beta superfamily ligands (e.g., inhibits Smad signaling). Heteromultimer-ligand binding and inhibition may be determined using a variety of assays including, for example, those described herein (e.g., in vitro binding and/or cell-based signaling assays). In some embodiments, a Cryptic protein:TGFBRII heteromultimer of the disclosure has a different TGF-beta ligand binding and/or inhibition profile (specificity) compared to a corresponding homomultimer (e.g., Cryptic protein and TGFBRII homomultimers). In some embodiments, a Cryptic protein:TGFBRII heteromultimer of the disclosure is a heterodimer.

[0108] In certain aspects, the disclosure relates to heteromultimers that comprise at least one Cryptic protein polypeptide, which includes fragments, functional variants, and modified forms thereof, and at least one BMPRII polypeptide, which includes fragments, functional variants, and modified forms thereof. In some embodiments, the Cryptic protein:BMPRII heteromultimer comprises a polypeptide that is at least 70%, 75%, 80%, 85%, 90%, 91%, 92%, 93%, 94%, 95%, 95%, 96%, 97%, 98%, 99%, or 100% identical to the amino acid sequence of any one of SEQ ID NOs: 521, 522, 525, 526, 529, or 530. In some embodiments, the Cryptic protein:BMPRII heteromultimer comprises a polypeptide that is at least 70%, 75%, 80%, 85%, 90%, 91%, 92%, 93%, 94%, 95%, 95%, 96%, 97%, 98%, 99%, or 100% identical to a polypeptide that begins at any one of amino acids of 26-90 of SEQ ID NO: 521 and ends at any one of amino acids 157-233 of SEQ ID NO: 521. In some embodiments, the Cryptic protein:BMPRII heteromultimer comprises a polypeptide that is at least 70%, 75%, 80%, 85%, 90%, 91%, 92%, 93%, 94%, 95%, 95%, 96%, 97%, 98%, 99%, or 100% identical to a polypeptide that begins at any one of amino acids of 26-30 of SEQ ID NO: 525 and ends at any one of amino acids 82-191 of SEQ ID NO: 525. In some embodiments, the Cryptic protein:BMPRII heteromultimer comprises a polypeptide that is at least 70%, 75%, 80%, 85%, 90%, 91%, 92%, 93%, 94%, 95%, 95%, 96%, 97%, 98%, 99%, or 100% identical to a polypeptide that begins at any one of amino acids of 26-30 of SEQ ID NO: 529, and ends at any one of amino acids 82-148 of SEQ ID NO: 529. In some embodiments, a Cryptic protein:BMPRII heteromultimer comprises a polypeptide that is at least 70%, 75%, 80%, 85%, 90%, 91%, 92%, 93%, 94%, 95%, 95%, 96%, 97%, 98%, 99%, or 100% identical to the amino acid sequence of any one of SEQ ID NOs: 46, 47, 71, or 72. In some embodiments, a Cryptic protein:BMPRII heteromultimer comprises a polypeptide that is at least 70%, 75%, 80%, 85%, 90%, 91%, 92%, 93%, 94%, 95%, 95%, 96%, 97%, 98%, 99%, or 100% identical to a polypeptide that begins at any one of amino acids of 27-34 of SEQ ID NO: 46 and ends at any one of amino acids 123-150 of SEQ ID NO: 46. In some embodiments, a Cryptic protein:BMPRII heteromultimer comprises a polypeptide that is at least 70%, 75%, 80%, 85%, 90%, 91%, 92%, 93%, 94%, 95%, 95%, 96%, 97%, 98%, 99%, or 100% identical to a polypeptide that begins at any one of amino acids of 27-34 of SEQ ID NO: 71 and ends at any one of amino acids 123-150 of SEQ ID NO: 71. In certain preferred embodiments, Cryptic protein:BMPRII heteromultimers are soluble. In some embodiments, a Cryptic protein:BMPRII heteromultimer of the disclosure binds to one or more TGF-beta superfamily ligands (e.g., binds to one or more TGF-beta superfamily ligands with a K_{D} of at least 1×10⁻⁷). In some embodiments, a Cryptic protein:BMPRII heteromultimer of the disclosure inhibits one or more TGF-beta superfamily ligands (e.g., inhibits Smad signaling). Heteromultimer-ligand binding and inhibition may be determined using a variety of assays including, for example, those described herein (e.g., in vitro binding and/or cell-based signaling assays). In some embodiments, a Cryptic protein:BMPRII heteromultimer of the disclosure has a different TGF-beta ligand binding and/or inhibition profile (specificity) compared to a corresponding homomultimer (e.g., Cryptic protein and BMPRII homomultimers). In some embodiments, a Cryptic protein:BMPRII heteromultimer of the disclosure is a heterodimer.

[0109] In certain aspects, the disclosure relates to heteromultimers that comprise at least one Cryptic protein polypeptide, which includes fragments, functional variants, and modified forms thereof, and at least one MISRII polypeptide, which includes fragments, functional variants, and modified forms thereof. In some embodiments, the Cryptic protein:MISRII heteromultimer comprises a polypeptide that is at least 70%, 75%, 80%, 85%, 90%, 91%, 92%, 93%, 94%, 95%, 95%, 96%, 97%, 98%, 99%, or 100% identical to the amino acid sequence of any one of SEQ ID NOs: 521, 522, 525, 526, 529, or 530. In some embodiments, the Cryptic protein:MISRII heteromultimer comprises a polypeptide that is at least 70%, 75%, 80%, 85%, 90%, 91%, 92%, 93%, 94%, 95%, 95%, 96%, 97%, 98%, 99%, or 100% identical to a polypeptide that begins at any one of amino acids of 26-90 of SEQ ID NO: 521 and ends at any one of amino acids 157-233 of SEQ ID NO: 521. In some embodiments, the Cryptic protein:MISRII heteromultimer comprises a polypeptide that is at least 70%, 75%, 80%, 85%, 90%, 91%, 92%, 93%, 94%, 95%, 95%, 96%, 97%, 98%, 99%, or 100% identical to a polypeptide that begins at any one of amino acids of 26-30 of SEQ ID NO: 525 and ends at any one of amino acids 82-191 of SEQ ID NO: 525. In some embodiments, the Cryptic protein:MISRII heteromultimer comprises a polypeptide that is at least 70%, 75%, 80%, 85%, 90%, 91%, 92%, 93%, 94%, 95%, 95%, 96%, 97%, 98%, 99%, or 100% identical to a polypeptide that begins at any one of amino acids of 26-30 of SEQ ID NO: 529, and ends at any one of amino acids 82-148 of SEQ ID NO: 529. In some embodiments, a Cryptic protein:MISRII heteromultimer comprises a polypeptide that is at least 70%, 75%, 80%, 85%, 90%, 91%, 92%, 93%, 94%, 95%, 95%, 96%, 97%, 98%, 99%, or 100% identical to the amino acid sequence of any one of SEQ ID NOs: 50, 51, 75, 76, 79, or 80. In some embodiments, a Cryptic protein:MISRII heteromultimer comprises a polypeptide that is at least 70%, 75%, 80%, 85%, 90%, 91%, 92%, 93%, 94%, 95%, 95%, 96%, 97%, 98%, 99%, or 100% identical to a polypeptide that begins at any one of amino acids of 17-24 of SEQ ID NO: 50 and ends at any one of amino acids 116-149 of SEQ ID NO: 50. In some embodiments, a Cryptic protein:MISRII heteromultimer comprises a polypeptide that is at least 70%, 75%, 80%, 85%, 90%, 91%, 92%, 93%, 94%, 95%, 95%, 96%, 97%, 98%, 99%, or 100% identical to a polypeptide that begins at any one of amino acids of 17-24 of SEQ ID NO: 75 and ends at any one of amino acids 116-149 of SEQ ID NO: 75. In some embodiments, a Cryptic protein:MISRII heteromultimer comprises a polypeptide that is at least 70%, 75%, 80%, 85%, 90%, 91%, 92%, 93%, 94%, 95%, 95%, 96%, 97%, 98%, 99%, or 100% identical to a polypeptide that begins at any one of amino acids of 17-24 of SEQ ID NO: 50 and ends at any one of amino acids 116-149 of SEQ ID NO: 79. In certain preferred embodiments, Cryptic protein:MISRII heteromultimers are soluble. In some embodiments, a Cryptic protein:MISRII heteromultimer of the disclosure binds to one or more TGF-beta superfamily ligands (e.g., binds to one or more TGF-beta superfamily ligands with a K_{D} of at least 1×10⁻⁷). In some embodiments, a Cryptic protein:MISRII heteromultimer of the disclosure inhibits one or more TGF-beta superfamily ligands (e.g., inhibits Smad signaling). Heteromultimer-ligand binding and inhibition may be determined using a variety of assays including, for example, those described herein (e.g., in vitro binding and/or cell-based signaling assays). In some embodiments, a Cryptic protein:MISRII heteromultimer of the disclosure has a different TGF-beta ligand binding and/or inhibition profile (specificity) compared to a corresponding homomultimer (e.g., Cryptic protein and MISRII homomultimers). In some embodiments, a Cryptic protein:MISRII heteromultimer of the disclosure is a heterodimer.

[0110] In certain aspects, the disclosure relates to heteromultimers that comprise at least one Cryptic family protein 1B polypeptide, which includes fragments, functional variants, and modified forms thereof, and at least one ActRIIA polypeptide, which includes fragments, functional variants, and modified forms thereof. In some embodiments, the Cryptic family protein 1B:ActRIIA heteromultimer comprises a polypeptide that is at least 70%, 75%, 80%, 85%, 90%, 91%, 92%, 93%, 94%, 95%, 95%, 96%, 97%, 98%, 99%, or 100% identical to the amino acid sequence of any one of SEQ ID NOs: 533 or 534. In some embodiments, the Cryptic family protein 1B:ActRIIA heteromultimer comprises a polypeptide that is at least 70%, 75%, 80%, 85%, 90%, 91%, 92%, 93%, 94%, 95%, 95%, 96%, 97%, 98%, 99%, or 100% identical to a polypeptide that begins at any one of amino acids of 26-30 of SEQ ID NO: 533 and ends at any one of amino acids 82-223 of SEQ ID NO: 533. In some embodiments, a Cryptic family protein 1B:ActRIIA heteromultimer comprises a polypeptide that is at least 70%, 75%, 80%, 85%, 90%, 91%, 92%, 93%, 94%, 95%, 95%, 96%, 97%, 98%, 99%, or 100% identical to the amino acid sequence of any one of SEQ ID NOs: 9, 10, and 11. In some embodiments, a Cryptic family protein 1B:ActRIIA heteromultimer comprises a polypeptide that is at least 70%, 75%, 80%, 85%, 90%, 91%, 92%, 93%, 94%, 95%, 95%, 96%, 97%, 98%, 99%, or 100% identical to a polypeptide that begins at any one of amino acids of 21-30 of SEQ ID NO: 9, and ends at any one of amino acids 110-135 of SEQ ID NO: 9. In certain preferred embodiments, Cryptic family protein 1B:ActRIIA heteromultimers are soluble. In some embodiments, a Cryptic family protein 1B:ActRIIA heteromultimer of the disclosure binds to one or more TGF-beta superfamily ligands (e.g., binds to one or more TGF-beta superfamily ligands with a K_{D} of at least 1×10⁻⁷). In some embodiments, a Cryptic family protein 1B:ActRIIA heteromultimer of the disclosure inhibits one or more TGF-beta superfamily ligands (e.g., inhibits Smad signaling). Heteromultimer-ligand binding and inhibition may be determined using a variety of assays including, for example, those described herein (e.g., in vitro binding and/or cell-based signaling assays). In some embodiments, a Cryptic family protein 1B:ActRIIA heteromultimer of the disclosure has a different TGF-beta ligand binding and/or inhibition profile (specificity) compared to a corresponding homomultimer (e.g., Cryptic family protein 1B and ActRIIA homomultimers). In some embodiments, a Cryptic family protein 1B:ActRIIA heteromultimer of the disclosure is a heterodimer.

[0111] In certain aspects, the disclosure relates to heteromultimers that comprise at least one Cryptic family protein 1B polypeptide, which includes fragments, functional variants, and modified forms thereof, and at least one ActRIIB polypeptide, which includes fragments, functional variants, and modified forms thereof. In some embodiments, the Cryptic family protein 1B:ActRIIB heteromultimer comprises a polypeptide that is at least 70%, 75%, 80%, 85%, 90%, 91%, 92%, 93%, 94%, 95%, 95%, 96%, 97%, 98%, 99%, or 100% identical to the amino acid sequence of any one of SEQ ID NOs: 533 or 534. In some embodiments, the Cryptic family protein 1B:ActRIIB heteromultimer comprises a polypeptide that is at least 70%, 75%, 80%, 85%, 90%, 91%, 92%, 93%, 94%, 95%, 95%, 96%, 97%, 98%, 99%, or 100% identical to a polypeptide that begins at any one of amino acids of 26-30 of SEQ ID NO: 533 and ends at any one of amino acids 82-223 of SEQ ID NO: 533. In some embodiments, a Cryptic family protein 1B:ActRIIB heteromultimer comprises a polypeptide that is at least 70%, 75%, 80%, 85%, 90%, 91%, 92%, 93%, 94%, 95%, 95%, 96%, 97%, 98%, 99%, or 100% identical to the amino acid sequence of any one of SEQ ID NOs: 1, 2, 3, 4, 5, and 6. In some embodiments, a Cryptic family protein 1B:ActRIIB heteromultimer comprises a polypeptide that is at least 70%, 75%, 80%, 85%, 90%, 91%, 92%, 93%, 94%, 95%, 95%, 96%, 97%, 98%, 99%, or 100% identical to a polypeptide that begins at any one of amino acids 20-29 of SEQ ID NO: 1 and ends at a position corresponding to any one of amino acids 109-134 of SEQ ID NO: 1. In some embodiments, a Cryptic family protein 1B:ActRIIB heteromultimer comprises an ActRIIB polypeptide wherein the amino acid position corresponding to L79 of SEQ ID NO: 1 is not an acidic amino acid. In certain preferred embodiments, Cryptic family protein 1B:ActRIIB heteromultimers are soluble. In some embodiments, a Cryptic family protein 1B:ActRIIB heteromultimer of the disclosure binds to one or more TGF-beta superfamily ligands (e.g., binds to one or more TGF-beta superfamily ligands with a K_{D} of at least 1×10⁻⁷). In some embodiments, a Cryptic family protein 1B:ActRIIB heteromultimer of the disclosure inhibits one or more TGF-beta superfamily ligands (e.g., inhibits Smad signaling). Heteromultimer-ligand binding and inhibition may be determined using a variety of assays including, for example, those described herein (e.g., in vitro binding and/or cell-based signaling assays). In some embodiments, a Cryptic family protein 1B:ActRIIB heteromultimer of the disclosure has a different TGF-beta ligand binding and/or inhibition profile (specificity) compared to a corresponding homomultimer (e.g., Cryptic family protein 1B and ActRIIB homomultimers). In some embodiments, a Cryptic family protein 1B:ActRIIB heteromultimer of the disclosure is a heterodimer.

[0112] In certain aspects, the disclosure relates to heteromultimers that comprise at least one Cryptic family protein 1B polypeptide, which includes fragments, functional variants, and modified forms thereof, and at least one TGFBRII polypeptide, which includes fragments, functional variants, and modified forms thereof. In some embodiments, the Cryptic family protein 1B:TGFBRII heteromultimer comprises a polypeptide that is at least 70%, 75%, 80%, 85%, 90%, 91%, 92%, 93%, 94%, 95%, 95%, 96%, 97%, 98%, 99%, or 100% identical to the amino acid sequence of any one of SEQ ID NOs: 533 or 534. In some embodiments, the Cryptic family protein 1B:TGFBRII heteromultimer comprises a polypeptide that is at least 70%, 75%, 80%, 85%, 90%, 91%, 92%, 93%, 94%, 95%, 95%, 96%, 97%, 98%, 99%, or 100% identical to a polypeptide that begins at any one of amino acids of 26-30 of SEQ ID NO: 533 and ends at any one of amino acids 82-223 of SEQ ID NO: 533. In some embodiments, a Cryptic family protein 1B:TGFBRII heteromultimer comprises a polypeptide that is at least 70%, 75%, 80%, 85%, 90%, 91%, 92%, 93%, 94%, 95%, 95%, 96%, 97%, 98%, 99%, or 100% identical to the amino acid sequence of any one of SEQ ID NOs: 42, 43, 67, or 68. In some embodiments, a Cryptic family protein 1B:TGFBRII heteromultimer comprises a polypeptide that is at least 70%, 75%, 80%, 85%, 90%, 91%, 92%, 93%, 94%, 95%, 95%, 96%, 97%, 98%, 99%, or 100% identical to a polypeptide that begins at any one of amino acids of 23-51 of SEQ ID NO: 42 and ends at any one of amino acids 143-166 of SEQ ID NO: 42. In some embodiments, a Cryptic family protein 1B:TGFBRII heteromultimer comprises a polypeptide that is at least 70%, 75%, 80%, 85%, 90%, 91%, 92%, 93%, 94%, 95%, 95%, 96%, 97%, 98%, 99%, or 100% identical to a polypeptide that begins at any one of amino acids of 23-44 of SEQ ID NO: 67 and ends at any one of amino acids 168-191 of SEQ ID NO: 67. In certain preferred embodiments, Cryptic family protein 1B:TGFBRII heteromultimers are soluble. In some embodiments, a Cryptic family protein 1B:TGFBRII heteromultimer of the disclosure binds to one or more TGF-beta superfamily ligands (e.g., binds to one or more TGF-beta superfamily ligands with a K_{D} of at least 1×10⁻⁷). In some embodiments, a Cryptic family protein 1B:TGFBRII heteromultimer of the disclosure inhibits one or more TGF-beta superfamily ligands (e.g., inhibits Smad signaling). Heteromultimer-ligand binding and inhibition may be determined using a variety of assays including, for example, those described herein (e.g., in vitro binding and/or cell-based signaling assays). In some embodiments, a Cryptic family protein 1B:TGFBRII heteromultimer of the disclosure has a different TGF-beta ligand binding and/or inhibition profile (specificity) compared to a corresponding homomultimer (e.g., Cryptic family protein 1B and TGFBRII homomultimers). In some embodiments, a Cryptic family protein 1B:TGFBRII heteromultimer of the disclosure is a heterodimer.

[0113] In certain aspects, the disclosure relates to heteromultimers that comprise at least one Cryptic family protein 1B polypeptide, which includes fragments, functional variants, and modified forms thereof, and at least one BMPRII polypeptide, which includes fragments, functional variants, and modified forms thereof. In some embodiments, the Cryptic family protein 1B:BMPRII heteromultimer comprises a polypeptide that is at least 70%, 75%, 80%, 85%, 90%, 91%, 92%, 93%, 94%, 95%, 95%, 96%, 97%, 98%, 99%, or 100% identical to the amino acid sequence of any one of SEQ ID NOs: 533 or 534. In some embodiments, the Cryptic family protein 1B:BMPRII heteromultimer comprises a polypeptide that is at least 70%, 75%, 80%, 85%, 90%, 91%, 92%, 93%, 94%, 95%, 95%, 96%, 97%, 98%, 99%, or 100% identical to a polypeptide that begins at any one of amino acids of 26-30 of SEQ ID NO: 533 and ends at any one of amino acids 82-223 of SEQ ID NO: 533. In some embodiments, a Cryptic family protein 1B:BMPRII heteromultimer comprises a polypeptide that is at least 70%, 75%, 80%, 85%, 90%, 91%, 92%, 93%, 94%, 95%, 95%, 96%, 97%, 98%, 99%, or 100% identical to the amino acid sequence of any one of SEQ ID NOs: 46, 47, 71, or 72. In some embodiments, a Cryptic family protein 1B:BMPRII heteromultimer comprises a polypeptide that is at least 70%, 75%, 80%, 85%, 90%, 91%, 92%, 93%, 94%, 95%, 95%, 96%, 97%, 98%, 99%, or 100% identical to a polypeptide that begins at any one of amino acids of 27-34 of SEQ ID NO: 46 and ends at any one of amino acids 123-150 of SEQ ID NO: 46. In some embodiments, a Cryptic family protein 1B:BMPRII heteromultimer comprises a polypeptide that is at least 70%, 75%, 80%, 85%, 90%, 91%, 92%, 93%, 94%, 95%, 95%, 96%, 97%, 98%, 99%, or 100% identical to a polypeptide that begins at any one of amino acids of 27-34 of SEQ ID NO: 71 and ends at any one of amino acids 123-150 of SEQ ID NO: 71. In certain preferred embodiments, Cryptic family protein 1B:BMPRII heteromultimers are soluble. In some embodiments, a Cryptic family protein 1B:BMPRII heteromultimer of the disclosure binds to one or more TGF-beta superfamily ligands (e.g., binds to one or more TGF-beta superfamily ligands with a K_{D} of at least 1×10⁻⁷). In some embodiments, a Cryptic family protein 1B:BMPRII heteromultimer of the disclosure inhibits one or more TGF-beta superfamily ligands (e.g., inhibits Smad signaling). Heteromultimer-ligand binding and inhibition may be determined using a variety of assays including, for example, those described herein (e.g., in vitro binding and/or cell-based signaling assays). In some embodiments, a Cryptic family protein 1B:BMPRII heteromultimer of the disclosure has a different TGF-beta ligand binding and/or inhibition profile (specificity) compared to a corresponding homomultimer (e.g., Cryptic family protein 1B and BMPRII homomultimers). In some embodiments, a Cryptic family protein 1B:BMPRII heteromultimer of the disclosure is a heterodimer.

[0114] In certain aspects, the disclosure relates to heteromultimers that comprise at least one Cryptic family protein 1B polypeptide, which includes fragments, functional variants, and modified forms thereof, and at least one MISRII polypeptide, which includes fragments, functional variants, and modified forms thereof. In some embodiments, the Cryptic family protein 1B:MISRII heteromultimer comprises a polypeptide that is at least 70%, 75%, 80%, 85%, 90%, 91%, 92%, 93%, 94%, 95%, 95%, 96%, 97%, 98%, 99%, or 100% identical to the amino acid sequence of any one of SEQ ID NOs: 533 or 534. In some embodiments, the Cryptic family protein 1B:MISRII heteromultimer comprises a polypeptide that is at least 70%, 75%, 80%, 85%, 90%, 91%, 92%, 93%, 94%, 95%, 95%, 96%, 97%, 98%, 99%, or 100% identical to a polypeptide that begins at any one of amino acids of 26-30 of SEQ ID NO: 533 and ends at any one of amino acids 82-223 of SEQ ID NO: 533. In some embodiments, a Cryptic family protein 1B:MISRII heteromultimer comprises a polypeptide that is at least 70%, 75%, 80%, 85%, 90%, 91%, 92%, 93%, 94%, 95%, 95%, 96%, 97%, 98%, 99%, or 100% identical to the amino acid sequence of any one of SEQ ID NOs: 50, 51, 75, 76, 79, or 80. In some embodiments, a Cryptic family protein 1B:MISRII heteromultimer comprises a polypeptide that is at least 70%, 75%, 80%, 85%, 90%, 91%, 92%, 93%, 94%, 95%, 95%, 96%, 97%, 98%, 99%, or 100% identical to a polypeptide that begins at any one of amino acids of 17-24 of SEQ ID NO: 50 and ends at any one of amino acids 116-149 of SEQ ID NO: 50. In some embodiments, a Cryptic family protein 1B:MISRII heteromultimer comprises a polypeptide that is at least 70%, 75%, 80%, 85%, 90%, 91%, 92%, 93%, 94%, 95%, 95%, 96%, 97%, 98%, 99%, or 100% identical to a polypeptide that begins at any one of amino acids of 17-24 of SEQ ID NO: 75 and ends at any one of amino acids 116-149 of SEQ ID NO: 75. In some embodiments, a Cryptic family protein 1B:MISRII heteromultimer comprises a polypeptide that is at least 70%, 75%, 80%, 85%, 90%, 91%, 92%, 93%, 94%, 95%, 95%, 96%, 97%, 98%, 99%, or 100% identical to a polypeptide that begins at any one of amino acids of 17-24 of SEQ ID NO: 50 and ends at any one of amino acids 116-149 of SEQ ID NO: 79. In certain preferred embodiments, Cryptic family protein 1B:MISRII heteromultimers are soluble. In some embodiments, a Cryptic family protein 1B:MISRII heteromultimer of the disclosure binds to one or more TGF-beta superfamily ligands (e.g., binds to one or more TGF-beta superfamily ligands with a K_{D} of at least 1×10⁻⁷). In some embodiments, a Cryptic family protein 1B:MISRII heteromultimer of the disclosure inhibits one or more TGF-beta superfamily ligands (e.g., inhibits Smad signaling). Heteromultimer-ligand binding and inhibition may be determined using a variety of assays including, for example, those described herein (e.g., in vitro binding and/or cell-based signaling assays). In some embodiments, a Cryptic family protein 1B:MISRII heteromultimer of the disclosure has a different TGF-beta ligand binding and/or inhibition profile (specificity) compared to a corresponding homomultimer (e.g., Cryptic family protein 1B and MISRII homomultimers). In some embodiments, a Cryptic family protein 1B:MISRII heteromultimer of the disclosure is a heterodimer.

[0115] In certain aspects, the disclosure relates to heteromultimers that comprise at least one Crim1 polypeptide, which includes fragments, functional variants, and modified forms thereof, and at least one ActRIIA polypeptide, which includes fragments, functional variants, and modified forms thereof. In some embodiments, the Crim1:ActRIIA heteromultimer comprises a polypeptide that is at least 70%, 75%, 80%, 85%, 90%, 91%, 92%, 93%, 94%, 95%, 95%, 96%, 97%, 98%, 99%, or 100% identical to the amino acid sequence of any one of SEQ ID NOs: 537 or 538. In some embodiments, the Crim1:ActRIIA heteromultimer comprises a polypeptide that is at least 70%, 75%, 80%, 85%, 90%, 91%, 92%, 93%, 94%, 95%, 95%, 96%, 97%, 98%, 99%, or 100% identical to a polypeptide that begins at any one of amino acids of 35-37 of SEQ ID NO: 537 and ends at any one of amino acids 873-939 of SEQ ID NO: 537. In some embodiments, a Crim1:ActRIIA heteromultimer comprises a polypeptide that is at least 70%, 75%, 80%, 85%, 90%, 91%, 92%, 93%, 94%, 95%, 95%, 96%, 97%, 98%, 99%, or 100% identical to the amino acid sequence of any one of SEQ ID NOs: 9, 10, and 11. In some embodiments, a Crim1:ActRIIA heteromultimer comprises a polypeptide that is at least 70%, 75%, 80%, 85%, 90%, 91%, 92%, 93%, 94%, 95%, 95%, 96%, 97%, 98%, 99%, or 100% identical to a polypeptide that begins at any one of amino acids of 21-30 of SEQ ID NO: 9, and ends at any one of amino acids 110-135 of SEQ ID NO: 9. In certain preferred embodiments, Crim1:ActRIIA heteromultimers are soluble. In some embodiments, a Crim1:ActRIIA heteromultimer of the disclosure binds to one or more TGF-beta superfamily ligands (e.g., binds to one or more TGF-beta superfamily ligands with a K_{D} of at least 1×10⁻⁷). In some embodiments, a Crim1:ActRIIA heteromultimer of the disclosure inhibits one or more TGF-beta superfamily ligands (e.g., inhibits Smad signaling). Heteromultimer-ligand binding and inhibition may be determined using a variety of assays including, for example, those described herein (e.g., in vitro binding and/or cell-based signaling assays). In some embodiments, a Crim1:ActRIIA heteromultimer of the disclosure has a different TGF-beta ligand binding and/or inhibition profile (specificity) compared to a corresponding homomultimer (e.g., Crim1 and ActRIIA homomultimers). In some embodiments, a Crim1:ActRIIA heteromultimer of the disclosure is a heterodimer.

[0116] In certain aspects, the disclosure relates to heteromultimers that comprise at least one Crim1 polypeptide, which includes fragments, functional variants, and modified forms thereof, and at least one ActRIIB polypeptide, which includes fragments, functional variants, and modified forms thereof. In some embodiments, the Crim1:ActRIIB heteromultimer comprises a polypeptide that is at least 70%, 75%, 80%, 85%, 90%, 91%, 92%, 93%, 94%, 95%, 95%, 96%, 97%, 98%, 99%, or 100% identical to the amino acid sequence of any one of SEQ ID NOs: 537 or 538. In some embodiments, the Crim1:ActRIIB heteromultimer comprises a polypeptide that is at least 70%, 75%, 80%, 85%, 90%, 91%, 92%, 93%, 94%, 95%, 95%, 96%, 97%, 98%, 99%, or 100% identical to a polypeptide that begins at any one of amino acids of 35-37 of SEQ ID NO: 537 and ends at any one of amino acids 873-939 of SEQ ID NO: 537. In some embodiments, a Crim1:ActRIIB heteromultimer comprises a polypeptide that is at least 70%, 75%, 80%, 85%, 90%, 91%, 92%, 93%, 94%, 95%, 95%, 96%, 97%, 98%, 99%, or 100% identical to the amino acid sequence of any one of SEQ ID NOs: 1, 2, 3, 4, 5, and 6. In some embodiments, a Crim1:ActRIIB heteromultimer comprises a polypeptide that is at least 70%, 75%, 80%, 85%, 90%, 91%, 92%, 93%, 94%, 95%, 95%, 96%, 97%, 98%, 99%, or 100% identical to a polypeptide that begins at any one of amino acids 20-29 of SEQ ID NO: 1 and ends at a position corresponding to any one of amino acids 109-134 of SEQ ID NO: 1. In some embodiments, a Crim1:ActRIIB heteromultimer comprises an ActRIIB polypeptide wherein the amino acid position corresponding to L79 of SEQ ID NO: 1 is not an acidic amino acid. In certain preferred embodiments, Crim1:ActRIIB heteromultimers are soluble. In some embodiments, a Crim1:ActRIIB heteromultimer of the disclosure binds to one or more TGF-beta superfamily ligands (e.g., binds to one or more TGF-beta superfamily ligands with a K_{D} of at least 1×10⁻⁷). In some embodiments, a Crim1:ActRIIB heteromultimer of the disclosure inhibits one or more TGF-beta superfamily ligands (e.g., inhibits Smad signaling). Heteromultimer-ligand binding and inhibition may be determined using a variety of assays including, for example, those described herein (e.g., in vitro binding and/or cell-based signaling assays). In some embodiments, a Crim1:ActRIIB heteromultimer of the disclosure has a different TGF-beta ligand binding and/or inhibition profile (specificity) compared to a corresponding homomultimer (e.g., Crim1 and ActRIIB homomultimers). In some embodiments, a Crim1:ActRIIB heteromultimer of the disclosure is a heterodimer.

[0117] In certain aspects, the disclosure relates to heteromultimers that comprise at least one Crim1 polypeptide, which includes fragments, functional variants, and modified forms thereof, and at least one TGFBRII polypeptide, which includes fragments, functional variants, and modified forms thereof. In some embodiments, the Crim1:TGFBRII heteromultimer comprises a polypeptide that is at least 70%, 75%, 80%, 85%, 90%, 91%, 92%, 93%, 94%, 95%, 95%, 96%, 97%, 98%, 99%, or 100% identical to the amino acid sequence of any one of SEQ ID NOs: 537 or 538. In some embodiments, the Crim1:TGFBRII heteromultimer comprises a polypeptide that is at least 70%, 75%, 80%, 85%, 90%, 91%, 92%, 93%, 94%, 95%, 95%, 96%, 97%, 98%, 99%, or 100% identical to a polypeptide that begins at any one of amino acids of 35-37 of SEQ ID NO: 537 and ends at any one of amino acids 873-939 of SEQ ID NO: 537. In some embodiments, a Crim1:TGFBRII heteromultimer comprises a polypeptide that is at least 70%, 75%, 80%, 85%, 90%, 91%, 92%, 93%, 94%, 95%, 95%, 96%, 97%, 98%, 99%, or 100% identical to the amino acid sequence of any one of SEQ ID NOs: 42, 43, 67, or 68. In some embodiments, a Crim1:TGFBRII heteromultimer comprises a polypeptide that is at least 70%, 75%, 80%, 85%, 90%, 91%, 92%, 93%, 94%, 95%, 95%, 96%, 97%, 98%, 99%, or 100% identical to a polypeptide that begins at any one of amino acids of 23-51 of SEQ ID NO: 42 and ends at any one of amino acids 143-166 of SEQ ID NO: 42. In some embodiments, a Crim1:TGFBRII heteromultimer comprises a polypeptide that is at least 70%, 75%, 80%, 85%, 90%, 91%, 92%, 93%, 94%, 95%, 95%, 96%, 97%, 98%, 99%, or 100% identical to a polypeptide that begins at any one of amino acids of 23-44 of SEQ ID NO: 67 and ends at any one of amino acids 168-191 of SEQ ID NO: 67. In certain preferred embodiments, Crim1:TGFBRII heteromultimers are soluble. In some embodiments, a Crim1:TGFBRII heteromultimer of the disclosure binds to one or more TGF-beta superfamily ligands (e.g., binds to one or more TGF-beta superfamily ligands with a K_{D} of at least 1×10⁻⁷). In some embodiments, a Crim1:TGFBRII heteromultimer of the disclosure inhibits one or more TGF-beta superfamily ligands (e.g., inhibits Smad signaling). Heteromultimer-ligand binding and inhibition may be determined using a variety of assays including, for example, those described herein (e.g., in vitro binding and/or cell-based signaling assays). In some embodiments, a Crim1:TGFBRII heteromultimer of the disclosure has a different TGF-beta ligand binding and/or inhibition profile (specificity) compared to a corresponding homomultimer (e.g., Crim1 and TGFBRII homomultimers). In some embodiments, a Crim1:TGFBRII heteromultimer of the disclosure is a heterodimer.

[0118] In certain aspects, the disclosure relates to heteromultimers that comprise at least one Crim1 polypeptide, which includes fragments, functional variants, and modified forms thereof, and at least one BMPRII polypeptide, which includes fragments, functional variants, and modified forms thereof. In some embodiments, the Crim1:BMPRII heteromultimer comprises a polypeptide that is at least 70%, 75%, 80%, 85%, 90%, 91%, 92%, 93%, 94%, 95%, 95%, 96%, 97%, 98%, 99%, or 100% identical to the amino acid sequence of any one of SEQ ID NOs: 537 or 538. In some embodiments, the Crim1:BMPRII heteromultimer comprises a polypeptide that is at least 70%, 75%, 80%, 85%, 90%, 91%, 92%, 93%, 94%, 95%, 95%, 96%, 97%, 98%, 99%, or 100% identical to a polypeptide that begins at any one of amino acids of 35-37 of SEQ ID NO: 537 and ends at any one of amino acids 873-939 of SEQ ID NO: 537. In some embodiments, a Crim1:BMPRII heteromultimer comprises a polypeptide that is at least 70%, 75%, 80%, 85%, 90%, 91%, 92%, 93%, 94%, 95%, 95%, 96%, 97%, 98%, 99%, or 100% identical to the amino acid sequence of any one of SEQ ID NOs: 46, 47, 71, or 72. In some embodiments, a Crim1:BMPRII heteromultimer comprises a polypeptide that is at least 70%, 75%, 80%, 85%, 90%, 91%, 92%, 93%, 94%, 95%, 95%, 96%, 97%, 98%, 99%, or 100% identical to a polypeptide that begins at any one of amino acids of 27-34 of SEQ ID NO: 46 and ends at any one of amino acids 123-150 of SEQ ID NO: 46. In some embodiments, a Crim1:BMPRII heteromultimer comprises a polypeptide that is at least 70%, 75%, 80%, 85%, 90%, 91%, 92%, 93%, 94%, 95%, 95%, 96%, 97%, 98%, 99%, or 100% identical to a polypeptide that begins at any one of amino acids of 27-34 of SEQ ID NO: 71 and ends at any one of amino acids 123-150 of SEQ ID NO: 71. In certain preferred embodiments, Crim1:BMPRII heteromultimers are soluble. In some embodiments, a Crim1:BMPRII heteromultimer of the disclosure binds to one or more TGF-beta superfamily ligands (e.g., binds to one or more TGF-beta superfamily ligands with a K_{D} of at least 1×10⁻⁷). In some embodiments, a Crim1:BMPRII heteromultimer of the disclosure inhibits one or more TGF-beta superfamily ligands (e.g., inhibits Smad signaling). Heteromultimer-ligand binding and inhibition may be determined using a variety of assays including, for example, those described herein (e.g., in vitro binding and/or cell-based signaling assays). In some embodiments, a Crim1:BMPRII heteromultimer of the disclosure has a different TGF-beta ligand binding and/or inhibition profile (specificity) compared to a corresponding homomultimer (e.g., Crim1 and BMPRII homomultimers). In some embodiments, a Crim1:BMPRII heteromultimer of the disclosure is a heterodimer.

[0119] In certain aspects, the disclosure relates to heteromultimers that comprise at least one Crim1 polypeptide, which includes fragments, functional variants, and modified forms thereof, and at least one MISRII polypeptide, which includes fragments, functional variants, and modified forms thereof. In some embodiments, the Crim1:MISRII heteromultimer comprises a polypeptide that is at least 70%, 75%, 80%, 85%, 90%, 91%, 92%, 93%, 94%, 95%, 95%, 96%, 97%, 98%, 99%, or 100% identical to the amino acid sequence of any one of SEQ ID NOs: 537 or 538. In some embodiments, the Crim1:MISRII heteromultimer comprises a polypeptide that is at least 70%, 75%, 80%, 85%, 90%, 91%, 92%, 93%, 94%, 95%, 95%, 96%, 97%, 98%, 99%, or 100% identical to a polypeptide that begins at any one of amino acids of 35-37 of SEQ ID NO: 537 and ends at any one of amino acids 873-939 of SEQ ID NO: 537. In some embodiments, a Crim1:MISRII heteromultimer comprises a polypeptide that is at least 70%, 75%, 80%, 85%, 90%, 91%, 92%, 93%, 94%, 95%, 95%, 96%, 97%, 98%, 99%, or 100% identical to the amino acid sequence of any one of SEQ ID NOs: 50, 51, 75, 76, 79, or 80. In some embodiments, a Crim1:MISRII heteromultimer comprises a polypeptide that is at least 70%, 75%, 80%, 85%, 90%, 91%, 92%, 93%, 94%, 95%, 95%, 96%, 97%, 98%, 99%, or 100% identical to a polypeptide that begins at any one of amino acids of 17-24 of SEQ ID NO: 50 and ends at any one of amino acids 116-149 of SEQ ID NO: 50. In some embodiments, a Crim1:MISRII heteromultimer comprises a polypeptide that is at least 70%, 75%, 80%, 85%, 90%, 91%, 92%, 93%, 94%, 95%, 95%, 96%, 97%, 98%, 99%, or 100% identical to a polypeptide that begins at any one of amino acids of 17-24 of SEQ ID NO: 75 and ends at any one of amino acids 116-149 of SEQ ID NO: 75. In some embodiments, a Crim1:MISRII heteromultimer comprises a polypeptide that is at least 70%, 75%, 80%, 85%, 90%, 91%, 92%, 93%, 94%, 95%, 95%, 96%, 97%, 98%, 99%, or 100% identical to a polypeptide that begins at any one of amino acids of 17-24 of SEQ ID NO: 50 and ends at any one of amino acids 116-149 of SEQ ID NO: 79. In certain preferred embodiments, Crim1:MISRII heteromultimers are soluble. In some embodiments, a Crim1:MISRII heteromultimer of the disclosure binds to one or more TGF-beta superfamily ligands (e.g., binds to one or more TGF-beta superfamily ligands with a K_{D} of at least 1×10⁻⁷). In some embodiments, a Crim1:MISRII heteromultimer of the disclosure inhibits one or more TGF-beta superfamily ligands (e.g., inhibits Smad signaling). Heteromultimer-ligand binding and inhibition may be determined using a variety of assays including, for example, those described herein (e.g., in vitro binding and/or cell-based signaling assays). In some embodiments, a Crim1:MISRII heteromultimer of the disclosure has a different TGF-beta ligand binding and/or inhibition profile (specificity) compared to a corresponding homomultimer (e.g., Crim1 and MISRII homomultimers). In some embodiments, a Crim1:MISRII heteromultimer of the disclosure is a heterodimer.

[0120] In certain aspects, the disclosure relates to heteromultimers that comprise at least one Crim2 polypeptide, which includes fragments, functional variants, and modified forms thereof, and at least one ActRIIA polypeptide, which includes fragments, functional variants, and modified forms thereof. In some embodiments, the Crim2:ActRIIA heteromultimer comprises a polypeptide that is at least 70%, 75%, 80%, 85%, 90%, 91%, 92%, 93%, 94%, 95%, 95%, 96%, 97%, 98%, 99%, or 100% identical to the amino acid sequence of any one of SEQ ID NOs: 541, 542, 545, or 546. In some embodiments, the Crim2:ActRIIA heteromultimer comprises a polypeptide that is at least 70%, 75%, 80%, 85%, 90%, 91%, 92%, 93%, 94%, 95%, 95%, 96%, 97%, 98%, 99%, or 100% identical to a polypeptide that begins at any one of amino acids of 26-138 of SEQ ID NO: 541 and ends at any one of amino acids 1298-1503 of SEQ ID NO: 541. In some embodiments, the Crim2:ActRIIA heteromultimer comprises a polypeptide that is at least 70%, 75%, 80%, 85%, 90%, 91%, 92%, 93%, 94%, 95%, 95%, 96%, 97%, 98%, 99%, or 100% identical to a polypeptide that begins at any one of amino acids of 24-138 of SEQ ID NO: 545 and ends at any one of amino acids 539-814 of SEQ ID NO: 545. In some embodiments, a Crim2:ActRIIA heteromultimer comprises a polypeptide that is at least 70%, 75%, 80%, 85%, 90%, 91%, 92%, 93%, 94%, 95%, 95%, 96%, 97%, 98%, 99%, or 100% identical to the amino acid sequence of any one of SEQ ID NOs: 9, 10, and 11. In some embodiments, a Crim2:ActRIIA heteromultimer comprises a polypeptide that is at least 70%, 75%, 80%, 85%, 90%, 91%, 92%, 93%, 94%, 95%, 95%, 96%, 97%, 98%, 99%, or 100% identical to a polypeptide that begins at any one of amino acids of 21-30 of SEQ ID NO: 9, and ends at any one of amino acids 110-135 of SEQ ID NO: 9. In certain preferred embodiments, Crim2:ActRIIA heteromultimers are soluble. In some embodiments, a Crim2:ActRIIA heteromultimer of the disclosure binds to one or more TGF-beta superfamily ligands (e.g., binds to one or more TGF-beta superfamily ligands with a K_{D} of at least 1×10⁻⁷). In some embodiments, a Crim2:ActRIIA heteromultimer of the disclosure inhibits one or more TGF-beta superfamily ligands (e.g., inhibits Smad signaling). Heteromultimer-ligand binding and inhibition may be determined using a variety of assays including, for example, those described herein (e.g., in vitro binding and/or cell-based signaling assays). In some embodiments, a Crim2:ActRIIA heteromultimer of the disclosure has a different TGF-beta ligand binding and/or inhibition profile (specificity) compared to a corresponding homomultimer (e.g., Crim2 and ActRIIA homomultimers). In some embodiments, a Crim2:ActRIIA heteromultimer of the disclosure is a heterodimer.

[0121] In certain aspects, the disclosure relates to heteromultimers that comprise at least one Crim2 polypeptide, which includes fragments, functional variants, and modified forms thereof, and at least one ActRIIB polypeptide, which includes fragments, functional variants, and modified forms thereof. In some embodiments, the Crim2:ActRIIB heteromultimer comprises a polypeptide that is at least 70%, 75%, 80%, 85%, 90%, 91%, 92%, 93%, 94%, 95%, 95%, 96%, 97%, 98%, 99%, or 100% identical to the amino acid sequence of any one of SEQ ID NOs: 541, 542, 545, or 546. In some embodiments, the Crim2:ActRIIB heteromultimer comprises a polypeptide that is at least 70%, 75%, 80%, 85%, 90%, 91%, 92%, 93%, 94%, 95%, 95%, 96%, 97%, 98%, 99%, or 100% identical to a polypeptide that begins at any one of amino acids of 26-138 of SEQ ID NO: 541 and ends at any one of amino acids 1298-1503 of SEQ ID NO: 541. In some embodiments, the Crim2:ActRIIB heteromultimer comprises a polypeptide that is at least 70%, 75%, 80%, 85%, 90%, 91%, 92%, 93%, 94%, 95%, 95%, 96%, 97%, 98%, 99%, or 100% identical to a polypeptide that begins at any one of amino acids of 24-138 of SEQ ID NO: 545 and ends at any one of amino acids 539-814 of SEQ ID NO: 545. In some embodiments, a Crim2:ActRIIB heteromultimer comprises a polypeptide that is at least 70%, 75%, 80%, 85%, 90%, 91%, 92%, 93%, 94%, 95%, 95%, 96%, 97%, 98%, 99%, or 100% identical to the amino acid sequence of any one of SEQ ID NOs: 1, 2, 3, 4, 5, and 6. In some embodiments, a Crim2:ActRIIB heteromultimer comprises a polypeptide that is at least 70%, 75%, 80%, 85%, 90%, 91%, 92%, 93%, 94%, 95%, 95%, 96%, 97%, 98%, 99%, or 100% identical to a polypeptide that begins at any one of amino acids 20-29 of SEQ ID NO: 1 and ends at a position corresponding to any one of amino acids 109-134 of SEQ ID NO: 1. In some embodiments, a Crim2:ActRIIB heteromultimer comprises an ActRIIB polypeptide wherein the amino acid position corresponding to L79 of SEQ ID NO: 1 is not an acidic amino acid. In certain preferred embodiments, Crim2:ActRIIB heteromultimers are soluble. In some embodiments, a Crim2:ActRIIB heteromultimer of the disclosure binds to one or more TGF-beta superfamily ligands (e.g., binds to one or more TGF-beta superfamily ligands with a K_{D} of at least 1×10⁻⁷). In some embodiments, a Crim2:ActRIIB heteromultimer of the disclosure inhibits one or more TGF-beta superfamily ligands (e.g., inhibits Smad signaling). Heteromultimer-ligand binding and inhibition may be determined using a variety of assays including, for example, those described herein (e.g., in vitro binding and/or cell-based signaling assays). In some embodiments, a Crim2:ActRIIB heteromultimer of the disclosure has a different TGF-beta ligand binding and/or inhibition profile (specificity) compared to a corresponding homomultimer (e.g., Crim2 and ActRIIB homomultimers). In some embodiments, a Crim2:ActRIIB heteromultimer of the disclosure is a heterodimer.

[0122] In certain aspects, the disclosure relates to heteromultimers that comprise at least one Crim2 polypeptide, which includes fragments, functional variants, and modified forms thereof, and at least one TGFBRII polypeptide, which includes fragments, functional variants, and modified forms thereof. In some embodiments, the Crim2:TGFBRII heteromultimer comprises a polypeptide that is at least 70%, 75%, 80%, 85%, 90%, 91%, 92%, 93%, 94%, 95%, 95%, 96%, 97%, 98%, 99%, or 100% identical to the amino acid sequence of any one of SEQ ID NOs: 541, 542, 545, or 546. In some embodiments, the Crim2:TGFBRII heteromultimer comprises a polypeptide that is at least 70%, 75%, 80%, 85%, 90%, 91%, 92%, 93%, 94%, 95%, 95%, 96%, 97%, 98%, 99%, or 100% identical to a polypeptide that begins at any one of amino acids of 26-138 of SEQ ID NO: 541 and ends at any one of amino acids 1298-1503 of SEQ ID NO: 541. In some embodiments, the Crim2:TGFBRII heteromultimer comprises a polypeptide that is at least 70%, 75%, 80%, 85%, 90%, 91%, 92%, 93%, 94%, 95%, 95%, 96%, 97%, 98%, 99%, or 100% identical to a polypeptide that begins at any one of amino acids of 24-138 of SEQ ID NO: 545 and ends at any one of amino acids 539-814 of SEQ ID NO: 545. In some embodiments, a Crim2:TGFBRII heteromultimer comprises a polypeptide that is at least 70%, 75%, 80%, 85%, 90%, 91%, 92%, 93%, 94%, 95%, 95%, 96%, 97%, 98%, 99%, or 100% identical to the amino acid sequence of any one of SEQ ID NOs: 42, 43, 67, or 68. In some embodiments, a Crim2:TGFBRII heteromultimer comprises a polypeptide that is at least 70%, 75%, 80%, 85%, 90%, 91%, 92%, 93%, 94%, 95%, 95%, 96%, 97%, 98%, 99%, or 100% identical to a polypeptide that begins at any one of amino acids of 23-51 of SEQ ID NO: 42 and ends at any one of amino acids 143-166 of SEQ ID NO: 42. In some embodiments, a Crim2:TGFBRII heteromultimer comprises a polypeptide that is at least 70%, 75%, 80%, 85%, 90%, 91%, 92%, 93%, 94%, 95%, 95%, 96%, 97%, 98%, 99%, or 100% identical to a polypeptide that begins at any one of amino acids of 23-44 of SEQ ID NO: 67 and ends at any one of amino acids 168-191 of SEQ ID NO: 67. In certain preferred embodiments, Crim2:TGFBRII heteromultimers are soluble. In some embodiments, a Crim2:TGFBRII heteromultimer of the disclosure binds to one or more TGF-beta superfamily ligands (e.g., binds to one or more TGF-beta superfamily ligands with a K_{D} of at least 1×10⁻⁷). In some embodiments, a Crim2:TGFBRII heteromultimer of the disclosure inhibits one or more TGF-beta superfamily ligands (e.g., inhibits Smad signaling). Heteromultimer-ligand binding and inhibition may be determined using a variety of assays including, for example, those described herein (e.g., in vitro binding and/or cell-based signaling assays). In some embodiments, a Crim2:TGFBRII heteromultimer of the disclosure has a different TGF-beta ligand binding and/or inhibition profile (specificity) compared to a corresponding homomultimer (e.g., Crim2 and TGFBRII homomultimers). In some embodiments, a Crim2:TGFBRII heteromultimer of the disclosure is a heterodimer.

[0123] In certain aspects, the disclosure relates to heteromultimers that comprise at least one Crim2 polypeptide, which includes fragments, functional variants, and modified forms thereof, and at least one BMPRII polypeptide, which includes fragments, functional variants, and modified forms thereof. In some embodiments, the Crim2:BMPRII heteromultimer comprises a polypeptide that is at least 70%, 75%, 80%, 85%, 90%, 91%, 92%, 93%, 94%, 95%, 95%, 96%, 97%, 98%, 99%, or 100% identical to the amino acid sequence of any one of SEQ ID NOs: 541, 542, 545, or 546. In some embodiments, the Crim2:BMPRII heteromultimer comprises a polypeptide that is at least 70%, 75%, 80%, 85%, 90%, 91%, 92%, 93%, 94%, 95%, 95%, 96%, 97%, 98%, 99%, or 100% identical to a polypeptide that begins at any one of amino acids of 26-138 of SEQ ID NO: 541 and ends at any one of amino acids 1298-1503 of SEQ ID NO: 541. In some embodiments, the Crim2:BMPRII heteromultimer comprises a polypeptide that is at least 70%, 75%, 80%, 85%, 90%, 91%, 92%, 93%, 94%, 95%, 95%, 96%, 97%, 98%, 99%, or 100% identical to a polypeptide that begins at any one of amino acids of 24-138 of SEQ ID NO: 545 and ends at any one of amino acids 539-814 of SEQ ID NO: 545. In some embodiments, a Crim2:BMPRII heteromultimer comprises a polypeptide that is at least 70%, 75%, 80%, 85%, 90%, 91%, 92%, 93%, 94%, 95%, 95%, 96%, 97%, 98%, 99%, or 100% identical to the amino acid sequence of any one of SEQ ID NOs: 46, 47, 71, or 72. In some embodiments, a Crim2:BMPRII heteromultimer comprises a polypeptide that is at least 70%, 75%, 80%, 85%, 90%, 91%, 92%, 93%, 94%, 95%, 95%, 96%, 97%, 98%, 99%, or 100% identical to a polypeptide that begins at any one of amino acids of 27-34 of SEQ ID NO: 46 and ends at any one of amino acids 123-150 of SEQ ID NO: 46. In some embodiments, a Crim2:BMPRII heteromultimer comprises a polypeptide that is at least 70%, 75%, 80%, 85%, 90%, 91%, 92%, 93%, 94%, 95%, 95%, 96%, 97%, 98%, 99%, or 100% identical to a polypeptide that begins at any one of amino acids of 27-34 of SEQ ID NO: 71 and ends at any one of amino acids 123-150 of SEQ ID NO: 71. In certain preferred embodiments, Crim2:BMPRII heteromultimers are soluble. In some embodiments, a Crim2:BMPRII heteromultimer of the disclosure binds to one or more TGF-beta superfamily ligands (e.g., binds to one or more TGF-beta superfamily ligands with a K_{D} of at least 1×10⁻⁷). In some embodiments, a Crim2:BMPRII heteromultimer of the disclosure inhibits one or more TGF-beta superfamily ligands (e.g., inhibits Smad signaling). Heteromultimer-ligand binding and inhibition may be determined using a variety of assays including, for example, those described herein (e.g., in vitro binding and/or cell-based signaling assays). In some embodiments, a Crim2:BMPRII heteromultimer of the disclosure has a different TGF-beta ligand binding and/or inhibition profile (specificity) compared to a corresponding homomultimer (e.g., Crim2 and BMPRII homomultimers). In some embodiments, a Crim2:BMPRII heteromultimer of the disclosure is a heterodimer.

[0124] In certain aspects, the disclosure relates to heteromultimers that comprise at least one Crim2 polypeptide, which includes fragments, functional variants, and modified forms thereof, and at least one MISRII polypeptide, which includes fragments, functional variants, and modified forms thereof. In some embodiments, the Crim2:MISRII heteromultimer comprises a polypeptide that is at least 70%, 75%, 80%, 85%, 90%, 91%, 92%, 93%, 94%, 95%, 95%, 96%, 97%, 98%, 99%, or 100% identical to the amino acid sequence of any one of SEQ ID NOs: 541, 542, 545, or 546. In some embodiments, the Crim2:MISRII heteromultimer comprises a polypeptide that is at least 70%, 75%, 80%, 85%, 90%, 91%, 92%, 93%, 94%, 95%, 95%, 96%, 97%, 98%, 99%, or 100% identical to a polypeptide that begins at any one of amino acids of 26-138 of SEQ ID NO: 541 and ends at any one of amino acids 1298-1503 of SEQ ID NO: 541. In some embodiments, the Crim2:MISRII heteromultimer comprises a polypeptide that is at least 70%, 75%, 80%, 85%, 90%, 91%, 92%, 93%, 94%, 95%, 95%, 96%, 97%, 98%, 99%, or 100% identical to a polypeptide that begins at any one of amino acids of 24-138 of SEQ ID NO: 545 and ends at any one of amino acids 539-814 of SEQ ID NO: 545. In some embodiments, a Crim2:MISRII heteromultimer comprises a polypeptide that is at least 70%, 75%, 80%, 85%, 90%, 91%, 92%, 93%, 94%, 95%, 95%, 96%, 97%, 98%, 99%, or 100% identical to the amino acid sequence of any one of SEQ ID NOs: 50, 51, 75, 76, 79, or 80. In some embodiments, a Crim2:MISRII heteromultimer comprises a polypeptide that is at least 70%, 75%, 80%, 85%, 90%, 91%, 92%, 93%, 94%, 95%, 95%, 96%, 97%, 98%, 99%, or 100% identical to a polypeptide that begins at any one of amino acids of 17-24 of SEQ ID NO: 50 and ends at any one of amino acids 116-149 of SEQ ID NO: 50. In some embodiments, a Crim2:MISRII heteromultimer comprises a polypeptide that is at least 70%, 75%, 80%, 85%, 90%, 91%, 92%, 93%, 94%, 95%, 95%, 96%, 97%, 98%, 99%, or 100% identical to a polypeptide that begins at any one of amino acids of 17-24 of SEQ ID NO: 75 and ends at any one of amino acids 116-149 of SEQ ID NO: 75. In some embodiments, a Crim2:MISRII heteromultimer comprises a polypeptide that is at least 70%, 75%, 80%, 85%, 90%, 91%, 92%, 93%, 94%, 95%, 95%, 96%, 97%, 98%, 99%, or 100% identical to a polypeptide that begins at any one of amino acids of 17-24 of SEQ ID NO: 50 and ends at any one of amino acids 116-149 of SEQ ID NO: 79. In certain preferred embodiments, Crim2:MISRII heteromultimers are soluble. In some embodiments, a Crim2:MISRII heteromultimer of the disclosure binds to one or more TGF-beta superfamily ligands (e.g., binds to one or more TGF-beta superfamily ligands with a K_{D} of at least 1×10⁻⁷). In some embodiments, a Crim2:MISRII heteromultimer of the disclosure inhibits one or more TGF-beta superfamily ligands (e.g., inhibits Smad signaling). Heteromultimer-ligand binding and inhibition may be determined using a variety of assays including, for example, those described herein (e.g., in vitro binding and/or cell-based signaling assays). In some embodiments, a Crim2:MISRII heteromultimer of the disclosure has a different TGF-beta ligand binding and/or inhibition profile (specificity) compared to a corresponding homomultimer (e.g., Crim2 and MISRII homomultimers). In some embodiments, a Crim2:MISRII heteromultimer of the disclosure is a heterodimer.

[0125] In certain aspects, the disclosure relates to heteromultimers that comprise at least one BAMBI polypeptide, which includes fragments, functional variants, and modified forms thereof, and at least one ActRIIA polypeptide, which includes fragments, functional variants, and modified forms thereof. In some embodiments, the BAMBI:ActRIIA heteromultimer comprises a polypeptide that is at least 70%, 75%, 80%, 85%, 90%, 91%, 92%, 93%, 94%, 95%, 95%, 96%, 97%, 98%, 99%, or 100% identical to the amino acid sequence of any one of SEQ ID NOs: 549 or 550. In some embodiments, the BAMBI:ActRIIA heteromultimer comprises a polypeptide that is at least 70%, 75%, 80%, 85%, 90%, 91%, 92%, 93%, 94%, 95%, 95%, 96%, 97%, 98%, 99%, or 100% identical to a polypeptide that begins at any one of amino acids of 21-30 of SEQ ID NO: 549 and ends at any one of amino acids 104-152 of SEQ ID NO: 549. In some embodiments, a BAMBI:ActRIIA heteromultimer comprises a polypeptide that is at least 70%, 75%, 80%, 85%, 90%, 91%, 92%, 93%, 94%, 95%, 95%, 96%, 97%, 98%, 99%, or 100% identical to the amino acid sequence of any one of SEQ ID NOs: 9, 10, and 11. In some embodiments, a BAMBI:ActRIIA heteromultimer comprises a polypeptide that is at least 70%, 75%, 80%, 85%, 90%, 91%, 92%, 93%, 94%, 95%, 95%, 96%, 97%, 98%, 99%, or 100% identical to a polypeptide that begins at any one of amino acids of 21-30 of SEQ ID NO: 9, and ends at any one of amino acids 110-135 of SEQ ID NO: 9. In certain preferred embodiments, BAMBI:ActRIIA heteromultimers are soluble. In some embodiments, a BAMBI:ActRIIA heteromultimer of the disclosure binds to one or more TGF-beta superfamily ligands (e.g., binds to one or more TGF-beta superfamily ligands with a K_{D} of at least 1×10⁻⁷). In some embodiments, a BAMBI:ActRIIA heteromultimer of the disclosure inhibits one or more TGF-beta superfamily ligands (e.g., inhibits Smad signaling).

[0126] Heteromultimer-ligand binding and inhibition may be determined using a variety of assays including, for example, those described herein (e.g., in vitro binding and/or cell-based signaling assays). In some embodiments, a BAMBI:ActRIIA heteromultimer of the disclosure has a different TGF-beta ligand binding and/or inhibition profile (specificity) compared to a corresponding homomultimer (e.g., BAMBI and ActRIIA homomultimers). In some embodiments, a BAMBI:ActRIIA heteromultimer of the disclosure is a heterodimer.

[0127] In certain aspects, the disclosure relates to heteromultimers that comprise at least one BAMBI polypeptide, which includes fragments, functional variants, and modified forms thereof, and at least one ActRIIB polypeptide, which includes fragments, functional variants, and modified forms thereof. In some embodiments, the BAMBI:ActRIIB heteromultimer comprises a polypeptide that is at least 70%, 75%, 80%, 85%, 90%, 91%, 92%, 93%, 94%, 95%, 95%, 96%, 97%, 98%, 99%, or 100% identical to the amino acid sequence of any one of SEQ ID NOs: 549 or 550. In some embodiments, the BAMBI:ActRIIB heteromultimer comprises a polypeptide that is at least 70%, 75%, 80%, 85%, 90%, 91%, 92%, 93%, 94%, 95%, 95%, 96%, 97%, 98%, 99%, or 100% identical to a polypeptide that begins at any one of amino acids of 21-30 of SEQ ID NO: 549 and ends at any one of amino acids 104-152 of SEQ ID NO: 549. In some embodiments, a BAMBI:ActRIIB heteromultimer comprises a polypeptide that is at least 70%, 75%, 80%, 85%, 90%, 91%, 92%, 93%, 94%, 95%, 95%, 96%, 97%, 98%, 99%, or 100% identical to the amino acid sequence of any one of SEQ ID NOs: 1, 2, 3, 4, 5, and 6. In some embodiments, a BAMBI:ActRIIB heteromultimer comprises a polypeptide that is at least 70%, 75%, 80%, 85%, 90%, 91%, 92%, 93%, 94%, 95%, 95%, 96%, 97%, 98%, 99%, or 100% identical to a polypeptide that begins at any one of amino acids 20-29 of SEQ ID NO: 1 and ends at a position corresponding to any one of amino acids 109-134 of SEQ ID NO: 1. In some embodiments, a BAMBI:ActRIIB heteromultimer comprises an ActRIIB polypeptide wherein the amino acid position corresponding to L79 of SEQ ID NO: 1 is not an acidic amino acid. In certain preferred embodiments, BAMBI:ActRIIB heteromultimers are soluble. In some embodiments, a BAMBI:ActRIIB heteromultimer of the disclosure binds to one or more TGF-beta superfamily ligands (e.g., binds to one or more TGF-beta superfamily ligands with a K_{D} of at least 1×10⁻⁷). In some embodiments, a BAMBI:ActRIIB heteromultimer of the disclosure inhibits one or more TGF-beta superfamily ligands (e.g., inhibits Smad signaling). Heteromultimer-ligand binding and inhibition may be determined using a variety of assays including, for example, those described herein (e.g., in vitro binding and/or cell-based signaling assays). In some embodiments, a BAMBI:ActRIIB heteromultimer of the disclosure has a different TGF-beta ligand binding and/or inhibition profile (specificity) compared to a corresponding homomultimer (e.g., BAMBI and ActRIIB homomultimers). In some embodiments, a BAMBI:ActRIIB heteromultimer of the disclosure is a heterodimer.

[0128] In certain aspects, the disclosure relates to heteromultimers that comprise at least one BAMBI polypeptide, which includes fragments, functional variants, and modified forms thereof, and at least one TGFBRII polypeptide, which includes fragments, functional variants, and modified forms thereof. In some embodiments, the BAMBI:TGFBRII heteromultimer comprises a polypeptide that is at least 70%, 75%, 80%, 85%, 90%, 91%, 92%, 93%, 94%, 95%, 95%, 96%, 97%, 98%, 99%, or 100% identical to the amino acid sequence of any one of SEQ ID NOs: 549 or 550. In some embodiments, the BAMBI:TGFBRII heteromultimer comprises a polypeptide that is at least 70%, 75%, 80%, 85%, 90%, 91%, 92%, 93%, 94%, 95%, 95%, 96%, 97%, 98%, 99%, or 100% identical to a polypeptide that begins at any one of amino acids of 21-30 of SEQ ID NO: 549 and ends at any one of amino acids 104-152 of SEQ ID NO: 549. In some embodiments, a BAMBI:TGFBRII heteromultimer comprises a polypeptide that is at least 70%, 75%, 80%, 85%, 90%, 91%, 92%, 93%, 94%, 95%, 95%, 96%, 97%, 98%, 99%, or 100% identical to the amino acid sequence of any one of SEQ ID NOs: 42, 43, 67, or 68. In some embodiments, a BAMBI:TGFBRII heteromultimer comprises a polypeptide that is at least 70%, 75%, 80%, 85%, 90%, 91%, 92%, 93%, 94%, 95%, 95%, 96%, 97%, 98%, 99%, or 100% identical to a polypeptide that begins at any one of amino acids of 23-51 of SEQ ID NO: 42 and ends at any one of amino acids 143-166 of SEQ ID NO: 42. In some embodiments, a BAMBI:TGFBRII heteromultimer comprises a polypeptide that is at least 70%, 75%, 80%, 85%, 90%, 91%, 92%, 93%, 94%, 95%, 95%, 96%, 97%, 98%, 99%, or 100% identical to a polypeptide that begins at any one of amino acids of 23-44 of SEQ ID NO: 67 and ends at any one of amino acids 168-191 of SEQ ID NO: 67. In certain preferred embodiments, BAMBI:TGFBRII heteromultimers are soluble. In some embodiments, a BAMBI:TGFBRII heteromultimer of the disclosure binds to one or more TGF-beta superfamily ligands (e.g., binds to one or more TGF-beta superfamily ligands with a K_{D} of at least 1×10⁻⁷). In some embodiments, a BAMBI:TGFBRII heteromultimer of the disclosure inhibits one or more TGF-beta superfamily ligands (e.g., inhibits Smad signaling). Heteromultimer-ligand binding and inhibition may be determined using a variety of assays including, for example, those described herein (e.g., in vitro binding and/or cell-based signaling assays). In some embodiments, a BAMBI:TGFBRII heteromultimer of the disclosure has a different TGF-beta ligand binding and/or inhibition profile (specificity) compared to a corresponding homomultimer (e.g., BAMBI and TGFBRII homomultimers). In some embodiments, a BAMBI:TGFBRII heteromultimer of the disclosure is a heterodimer.

[0129] In certain aspects, the disclosure relates to heteromultimers that comprise at least one BAMBI polypeptide, which includes fragments, functional variants, and modified forms thereof, and at least one BMPRII polypeptide, which includes fragments, functional variants, and modified forms thereof. In some embodiments, the BAMBI:BMPRII heteromultimer comprises a polypeptide that is at least 70%, 75%, 80%, 85%, 90%, 91%, 92%, 93%, 94%, 95%, 95%, 96%, 97%, 98%, 99%, or 100% identical to the amino acid sequence of any one of SEQ ID NOs: 549 or 550. In some embodiments, the BAMBI:BMPRII heteromultimer comprises a polypeptide that is at least 70%, 75%, 80%, 85%, 90%, 91%, 92%, 93%, 94%, 95%, 95%, 96%, 97%, 98%, 99%, or 100% identical to a polypeptide that begins at any one of amino acids of 21-30 of SEQ ID NO: 549 and ends at any one of amino acids 104-152 of SEQ ID NO: 549. In some embodiments, a BAMBI:BMPRII heteromultimer comprises a polypeptide that is at least 70%, 75%, 80%, 85%, 90%, 91%, 92%, 93%, 94%, 95%, 95%, 96%, 97%, 98%, 99%, or 100% identical to the amino acid sequence of any one of SEQ ID NOs: 46, 47, 71, or 72. In some embodiments, a BAMBI:BMPRII heteromultimer comprises a polypeptide that is at least 70%, 75%, 80%, 85%, 90%, 91%, 92%, 93%, 94%, 95%, 95%, 96%, 97%, 98%, 99%, or 100% identical to a polypeptide that begins at any one of amino acids of 27-34 of SEQ ID NO: 46 and ends at any one of amino acids 123-150 of SEQ ID NO: 46. In some embodiments, a BAMBI:BMPRII heteromultimer comprises a polypeptide that is at least 70%, 75%, 80%, 85%, 90%, 91%, 92%, 93%, 94%, 95%, 95%, 96%, 97%, 98%, 99%, or 100% identical to a polypeptide that begins at any one of amino acids of 27-34 of SEQ ID NO: 71 and ends at any one of amino acids 123-150 of SEQ ID NO: 71. In certain preferred embodiments, BAMBI:BMPRII heteromultimers are soluble. In some embodiments, a BAMBI:BMPRII heteromultimer of the disclosure binds to one or more TGF-beta superfamily ligands (e.g., binds to one or more TGF-beta superfamily ligands with a K_{D} of at least 1×10⁻⁷). In some embodiments, a BAMBI:BMPRII heteromultimer of the disclosure inhibits one or more TGF-beta superfamily ligands (e.g., inhibits Smad signaling). Heteromultimer-ligand binding and inhibition may be determined using a variety of assays including, for example, those described herein (e.g., in vitro binding and/or cell-based signaling assays). In some embodiments, a BAMBI:BMPRII heteromultimer of the disclosure has a different TGF-beta ligand binding and/or inhibition profile (specificity) compared to a corresponding homomultimer (e.g., BAMBI and BMPRII homomultimers). In some embodiments, a BAMBI:BMPRII heteromultimer of the disclosure is a heterodimer.

[0130] In certain aspects, the disclosure relates to heteromultimers that comprise at least one BAMBI polypeptide, which includes fragments, functional variants, and modified forms thereof, and at least one MISRII polypeptide, which includes fragments, functional variants, and modified forms thereof. In some embodiments, the BAMBI:MISRII heteromultimer comprises a polypeptide that is at least 70%, 75%, 80%, 85%, 90%, 91%, 92%, 93%, 94%, 95%, 95%, 96%, 97%, 98%, 99%, or 100% identical to the amino acid sequence of any one of SEQ ID NOs: 549 or 550. In some embodiments, the BAMBI:MISRII heteromultimer comprises a polypeptide that is at least 70%, 75%, 80%, 85%, 90%, 91%, 92%, 93%, 94%, 95%, 95%, 96%, 97%, 98%, 99%, or 100% identical to a polypeptide that begins at any one of amino acids of 21-30 of SEQ ID NO: 549 and ends at any one of amino acids 104-152 of SEQ ID NO: 549. In some embodiments, a BAMBI:MISRII heteromultimer comprises a polypeptide that is at least 70%, 75%, 80%, 85%, 90%, 91%, 92%, 93%, 94%, 95%, 95%, 96%, 97%, 98%, 99%, or 100% identical to the amino acid sequence of any one of SEQ ID NOs: 50, 51, 75, 76, 79, or 80. In some embodiments, a BAMBI:MISRII heteromultimer comprises a polypeptide that is at least 70%, 75%, 80%, 85%, 90%, 91%, 92%, 93%, 94%, 95%, 95%, 96%, 97%, 98%, 99%, or 100% identical to a polypeptide that begins at any one of amino acids of 17-24 of SEQ ID NO: 50 and ends at any one of amino acids 116-149 of SEQ ID NO: 50. In some embodiments, a BAMBI:MISRII heteromultimer comprises a polypeptide that is at least 70%, 75%, 80%, 85%, 90%, 91%, 92%, 93%, 94%, 95%, 95%, 96%, 97%, 98%, 99%, or 100% identical to a polypeptide that begins at any one of amino acids of 17-24 of SEQ ID NO: 75 and ends at any one of amino acids 116-149 of SEQ ID NO: 75. In some embodiments, a BAMBI:MISRII heteromultimer comprises a polypeptide that is at least 70%, 75%, 80%, 85%, 90%, 91%, 92%, 93%, 94%, 95%, 95%, 96%, 97%, 98%, 99%, or 100% identical to a polypeptide that begins at any one of amino acids of 17-24 of SEQ ID NO: 50 and ends at any one of amino acids 116-149 of SEQ ID NO: 79. In certain preferred embodiments, BAMBI:MISRII heteromultimers are soluble. In some embodiments, a BAMBI:MISRII heteromultimer of the disclosure binds to one or more TGF-beta superfamily ligands (e.g., binds to one or more TGF-beta superfamily ligands with a K_{D} of at least 1×10⁻⁷). In some embodiments, a BAMBI:MISRII heteromultimer of the disclosure inhibits one or more TGF-beta superfamily ligands (e.g., inhibits Smad signaling). Heteromultimer-ligand binding and inhibition may be determined using a variety of assays including, for example, those described herein (e.g., in vitro binding and/or cell-based signaling assays). In some embodiments, a BAMBI:MISRII heteromultimer of the disclosure has a different TGF-beta ligand binding and/or inhibition profile (specificity) compared to a corresponding homomultimer (e.g., BAMBI and MISRII homomultimers). In some embodiments, a BAMBI:MISRII heteromultimer of the disclosure is a heterodimer.

[0131] In certain aspects, the disclosure relates to heteromultimers that comprise at least one BMPER polypeptide, which includes fragments, functional variants, and modified forms thereof, and at least one ActRIIA polypeptide, which includes fragments, functional variants, and modified forms thereof. In some embodiments, the BMPER:ActRIIA heteromultimer comprises a polypeptide that is at least 70%, 75%, 80%, 85%, 90%, 91%, 92%, 93%, 94%, 95%, 95%, 96%, 97%, 98%, 99%, or 100% identical to the amino acid sequence of any one of SEQ ID NOs: 553 or 554. In some embodiments, the BMPER:ActRIIA heteromultimer comprises a polypeptide that is at least 70%, 75%, 80%, 85%, 90%, 91%, 92%, 93%, 94%, 95%, 95%, 96%, 97%, 98%, 99%, or 100% identical to a polypeptide that begins at any one of amino acids of 39-50 of SEQ ID NO: 553 and ends at any one of amino acids 364-369 of SEQ ID NO: 553. In some embodiments, the BMPER:ActRIIA heteromultimer comprises a polypeptide that is at least 70%, 75%, 80%, 85%, 90%, 91%, 92%, 93%, 94%, 95%, 95%, 96%, 97%, 98%, 99%, or 100% identical to a polypeptide that begins at any one of amino acids of 370-386 of SEQ ID NO: 553 and ends at any one of amino acids 682-685 of SEQ ID NO: 553. In some embodiments, the BMPER:ActRIIA heteromultimer comprises a polypeptide that is at least 70%, 75%, 80%, 85%, 90%, 91%, 92%, 93%, 94%, 95%, 95%, 96%, 97%, 98%, 99%, or 100% identical to a polypeptide that begins at any one of amino acids of 39-50 of SEQ ID NO: 553 and ends at any one of amino acids 682-685 of SEQ ID NO: 553. In some embodiments, the BMPER:ActRIIA heteromultimer comprises a BMPER protein, wherein the BMPER protein is a dimer comprising a first polypeptide that is at least 70%, 75%, 80%, 85%, 90%, 91%, 92%, 93%, 94%, 95%, 96%, 97%, 98%, 99%, or 100% identical to a polypeptide that begins at any one of amino acids of 39-50 of SEQ ID NO: 553 and ends at any one of amino acids 364-369 of SEQ ID NO: 553, and second polypeptide that is at least 70%, 75%, 80%, 85%, 90%, 91%, 92%, 93%, 94%, 95%, 96%, 97%, 98%, 99%, or 100% identical to a polypeptide that begins at any one of amino acids of 370-386 of SEQ ID NO: 553, and ends at any one of amino acids 682-685 of SEQ ID NO: 553. In some embodiments, the BMPER:ActRIIA heteromultimer comprises a single chain ligand trap that comprises a first BMPER polypeptide domain that is at least 70%, 75%, 80%, 85%, 90%, 91%, 92%, 93%, 94%, 95%, 96%, 97%, 98%, 99%, or 100% identical to a polypeptide that begins at any one of amino acids of 39-50 of SEQ ID NO: 553 and ends at any one of amino acids 364-369 of SEQ ID NO: 553, and second BMPER polypeptide domain that is at least 70%, 75%, 80%, 85%, 90%, 91%, 92%, 93%, 94%, 95%, 96%, 97%, 98%, 99%, or 100% identical to a polypeptide that begins at any one of amino acids of 370-386 of SEQ ID NO: 553 and ends at any one of amino acids 682-685 of SEQ ID NO: 553. In some embodiments, a BMPER:ActRIIA heteromultimer comprises a polypeptide that is at least 70%, 75%, 80%, 85%, 90%, 91%, 92%, 93%, 94%, 95%, 95%, 96%, 97%, 98%, 99%, or 100% identical to the amino acid sequence of any one of SEQ ID NOs: 9, 10, and 11. In some embodiments, a BMPER:ActRIIA heteromultimer comprises a polypeptide that is at least 70%, 75%, 80%, 85%, 90%, 91%, 92%, 93%, 94%, 95%, 95%, 96%, 97%, 98%, 99%, or 100% identical to a polypeptide that begins at any one of amino acids of 21-30 of SEQ ID NO: 9, and ends at any one of amino acids 110-135 of SEQ ID NO: 9. In certain preferred embodiments, BMPER:ActRIIA heteromultimers are soluble. In some embodiments, a BMPER:ActRIIA heteromultimer of the disclosure binds to one or more TGF-beta superfamily ligands (e.g., binds to one or more TGF-beta superfamily ligands with a K_{D} of at least 1×10⁻⁷). In some embodiments, a BMPER:ActRIIA heteromultimer of the disclosure inhibits one or more TGF-beta superfamily ligands (e.g., inhibits Smad signaling). Heteromultimer-ligand binding and inhibition may be determined using a variety of assays including, for example, those described herein (e.g., in vitro binding and/or cell-based signaling assays). In some embodiments, a BMPER:ActRIIA heteromultimer of the disclosure has a different TGF-beta ligand binding and/or inhibition profile (specificity) compared to a corresponding homomultimer (e.g., BMPER and ActRIIA homomultimers). In some embodiments, a BMPER:ActRIIA heteromultimer of the disclosure is a heterodimer.

[0132] In certain aspects, the disclosure relates to heteromultimers that comprise at least one BMPER polypeptide, which includes fragments, functional variants, and modified forms thereof, and at least one ActRIIB polypeptide, which includes fragments, functional variants, and modified forms thereof. In some embodiments, the BMPER:ActRIIB heteromultimer comprises a polypeptide that is at least 70%, 75%, 80%, 85%, 90%, 91%, 92%, 93%, 94%, 95%, 95%, 96%, 97%, 98%, 99%, or 100% identical to the amino acid sequence of any one of SEQ ID NOs: 553 or 554. In some embodiments, the BMPER:ActRIIB heteromultimer comprises a polypeptide that is at least 70%, 75%, 80%, 85%, 90%, 91%, 92%, 93%, 94%, 95%, 95%, 96%, 97%, 98%, 99%, or 100% identical to a polypeptide that begins at any one of amino acids of 39-50 of SEQ ID NO: 553 and ends at any one of amino acids 364-369 of SEQ ID NO: 553. In some embodiments, the BMPER:ActRIIB heteromultimer comprises a polypeptide that is at least 70%, 75%, 80%, 85%, 90%, 91%, 92%, 93%, 94%, 95%, 95%, 96%, 97%, 98%, 99%, or 100% identical to a polypeptide that begins at any one of amino acids of 370-386 of SEQ ID NO: 553 and ends at any one of amino acids 682-685 of SEQ ID NO: 553. In some embodiments, the BMPER:ActRIIB heteromultimer comprises a polypeptide that is at least 70%, 75%, 80%, 85%, 90%, 91%, 92%, 93%, 94%, 95%, 95%, 96%, 97%, 98%, 99%, or 100% identical to a polypeptide that begins at any one of amino acids of 39-50 of SEQ ID NO: 553 and ends at any one of amino acids 682-685 of SEQ ID NO: 553. In some embodiments, the BMPER:ActRIIB heteromultimer comprises a BMPER protein, wherein the BMPER protein is a dimer comprising a first polypeptide that is at least 70%, 75%, 80%, 85%, 90%, 91%, 92%, 93%, 94%, 95%, 96%, 97%, 98%, 99%, or 100% identical to a polypeptide that begins at any one of amino acids of 39-50 of SEQ ID NO: 553 and ends at any one of amino acids 364-369 of SEQ ID NO: 553, and second polypeptide that is at least 70%, 75%, 80%, 85%, 90%, 91%, 92%, 93%, 94%, 95%, 96%, 97%, 98%, 99%, or 100% identical to a polypeptide that begins at any one of amino acids of 370-386 of SEQ ID NO: 553, and ends at any one of amino acids 682-685 of SEQ ID NO: 553. In some embodiments, the BMPER:ActRIIB heteromultimer comprises a single chain ligand trap that comprises a first BMPER polypeptide domain that is at least 70%, 75%, 80%, 85%, 90%, 91%, 92%, 93%, 94%, 95%, 96%, 97%, 98%, 99%, or 100% identical to a polypeptide that begins at any one of amino acids of 39-50 of SEQ ID NO: 553 and ends at any one of amino acids 364-369 of SEQ ID NO: 553, and second BMPER polypeptide domain that is at least 70%, 75%, 80%, 85%, 90%, 91%, 92%, 93%, 94%, 95%, 96%, 97%, 98%, 99%, or 100% identical to a polypeptide that begins at any one of amino acids of 370-386 of SEQ ID NO: 553 and ends at any one of amino acids 682-685 of SEQ ID NO: 553. In some embodiments, a BMPER:ActRIIB heteromultimer comprises a polypeptide that is at least 70%, 75%, 80%, 85%, 90%, 91%, 92%, 93%, 94%, 95%, 95%, 96%, 97%, 98%, 99%, or 100% identical to the amino acid sequence of any one of SEQ ID NOs: 1, 2, 3, 4, 5, and 6. In some embodiments, a BMPER:ActRIIB heteromultimer comprises a polypeptide that is at least 70%, 75%, 80%, 85%, 90%, 91%, 92%, 93%, 94%, 95%, 95%, 96%, 97%, 98%, 99%, or 100% identical to a polypeptide that begins at any one of amino acids 20-29 of SEQ ID NO: 1 and ends at a position corresponding to any one of amino acids 109-134 of SEQ ID NO: 1. In some embodiments, a BMPER:ActRIIB heteromultimer comprises an ActRIIB polypeptide wherein the amino acid position corresponding to L79 of SEQ ID NO: 1 is not an acidic amino acid. In certain preferred embodiments, BMPER:ActRIIB heteromultimers are soluble. In some embodiments, a BMPER:ActRIIB heteromultimer of the disclosure binds to one or more TGF-beta superfamily ligands (e.g., binds to one or more TGF-beta superfamily ligands with a K_{D} of at least 1×10⁻⁷). In some embodiments, a BMPER:ActRIIB heteromultimer of the disclosure inhibits one or more TGF-beta superfamily ligands (e.g., inhibits Smad signaling). Heteromultimer-ligand binding and inhibition may be determined using a variety of assays including, for example, those described herein (e.g., in vitro binding and/or cell-based signaling assays). In some embodiments, a BMPER:ActRIIB heteromultimer of the disclosure has a different TGF-beta ligand binding and/or inhibition profile (specificity) compared to a corresponding homomultimer (e.g., BMPER and ActRIIB homomultimers). In some embodiments, a BMPER:ActRIIB heteromultimer of the disclosure is a heterodimer.

[0133] In certain aspects, the disclosure relates to heteromultimers that comprise at least one BMPER polypeptide, which includes fragments, functional variants, and modified forms thereof, and at least one TGFBRII polypeptide, which includes fragments, functional variants, and modified forms thereof. In some embodiments, the BMPER:TGFBRII heteromultimer comprises a polypeptide that is at least 70%, 75%, 80%, 85%, 90%, 91%, 92%, 93%, 94%, 95%, 95%, 96%, 97%, 98%, 99%, or 100% identical to the amino acid sequence of any one of SEQ ID NOs: 553 or 554. In some embodiments, the BMPER:TGFBRII heteromultimer comprises a polypeptide that is at least 70%, 75%, 80%, 85%, 90%, 91%, 92%, 93%, 94%, 95%, 95%, 96%, 97%, 98%, 99%, or 100% identical to a polypeptide that begins at any one of amino acids of 39-50 of SEQ ID NO: 553 and ends at any one of amino acids 364-369 of SEQ ID NO: 553. In some embodiments, the BMPER:TGFBRII heteromultimer comprises a polypeptide that is at least 70%, 75%, 80%, 85%, 90%, 91%, 92%, 93%, 94%, 95%, 95%, 96%, 97%, 98%, 99%, or 100% identical to a polypeptide that begins at any one of amino acids of 370-386 of SEQ ID NO: 553 and ends at any one of amino acids 682-685 of SEQ ID NO: 553. In some embodiments, the BMPER:TGFBRII heteromultimer comprises a polypeptide that is at least 70%, 75%, 80%, 85%, 90%, 91%, 92%, 93%, 94%, 95%, 95%, 96%, 97%, 98%, 99%, or 100% identical to a polypeptide that begins at any one of amino acids of 39-50 of SEQ ID NO: 553 and ends at any one of amino acids 682-685 of SEQ ID NO: 553. In some embodiments, the BMPER:TGFBRII heteromultimer comprises a BMPER protein, wherein the BMPER protein is a dimer comprising a first polypeptide that is at least 70%, 75%, 80%, 85%, 90%, 91%, 92%, 93%, 94%, 95%, 96%, 97%, 98%, 99%, or 100% identical to a polypeptide that begins at any one of amino acids of 39-50 of SEQ ID NO: 553 and ends at any one of amino acids 364-369 of SEQ ID NO: 553, and second polypeptide that is at least 70%, 75%, 80%, 85%, 90%, 91%, 92%, 93%, 94%, 95%, 96%, 97%, 98%, 99%, or 100% identical to a polypeptide that begins at any one of amino acids of 370-386 of SEQ ID NO: 553, and ends at any one of amino acids 682-685 of SEQ ID NO: 553. In some embodiments, the BMPER:TGFBRII heteromultimer comprises a single chain ligand trap that comprises a first BMPER polypeptide domain that is at least 70%, 75%, 80%, 85%, 90%, 91%, 92%, 93%, 94%, 95%, 96%, 97%, 98%, 99%, or 100% identical to a polypeptide that begins at any one of amino acids of 39-50 of SEQ ID NO: 553 and ends at any one of amino acids 364-369 of SEQ ID NO: 553, and second BMPER polypeptide domain that is at least 70%, 75%, 80%, 85%, 90%, 91%, 92%, 93%, 94%, 95%, 96%, 97%, 98%, 99%, or 100% identical to a polypeptide that begins at any one of amino acids of 370-386 of SEQ ID NO: 553 and ends at any one of amino acids 682-685 of SEQ ID NO: 553. In some embodiments, a BMPER:TGFBRII heteromultimer comprises a polypeptide that is at least 70%, 75%, 80%, 85%, 90%, 91%, 92%, 93%, 94%, 95%, 95%, 96%, 97%, 98%, 99%, or 100% identical to the amino acid sequence of any one of SEQ ID NOs: 42, 43, 67, or 68. In some embodiments, a BMPER:TGFBRII heteromultimer comprises a polypeptide that is at least 70%, 75%, 80%, 85%, 90%, 91%, 92%, 93%, 94%, 95%, 95%, 96%, 97%, 98%, 99%, or 100% identical to a polypeptide that begins at any one of amino acids of 23-51 of SEQ ID NO: 42 and ends at any one of amino acids 143-166 of SEQ ID NO: 42. In some embodiments, a BMPER:TGFBRII heteromultimer comprises a polypeptide that is at least 70%, 75%, 80%, 85%, 90%, 91%, 92%, 93%, 94%, 95%, 95%, 96%, 97%, 98%, 99%, or 100% identical to a polypeptide that begins at any one of amino acids of 23-44 of SEQ ID NO: 67 and ends at any one of amino acids 168-191 of SEQ ID NO: 67. In certain preferred embodiments, BMPER:TGFBRII heteromultimers are soluble. In some embodiments, a BMPER:TGFBRII heteromultimer of the disclosure binds to one or more TGF-beta superfamily ligands (e.g., binds to one or more TGF-beta superfamily ligands with a K_{D} of at least 1×10⁻⁷). In some embodiments, a BMPER:TGFBRII heteromultimer of the disclosure inhibits one or more TGF-beta superfamily ligands (e.g., inhibits Smad signaling). Heteromultimer-ligand binding and inhibition may be determined using a variety of assays including, for example, those described herein (e.g., in vitro binding and/or cell-based signaling assays). In some embodiments, a BMPER:TGFBRII heteromultimer of the disclosure has a different TGF-beta ligand binding and/or inhibition profile (specificity) compared to a corresponding homomultimer (e.g., BMPER and TGFBRII homomultimers). In some embodiments, a BMPER:TGFBRII heteromultimer of the disclosure is a heterodimer.

[0134] In certain aspects, the disclosure relates to heteromultimers that comprise at least one BMPER polypeptide, which includes fragments, functional variants, and modified forms thereof, and at least one BMPRII polypeptide, which includes fragments, functional variants, and modified forms thereof. In some embodiments, the BMPER:BMPRII heteromultimer comprises a polypeptide that is at least 70%, 75%, 80%, 85%, 90%, 91%, 92%, 93%, 94%, 95%, 95%, 96%, 97%, 98%, 99%, or 100% identical to the amino acid sequence of any one of SEQ ID NOs: 553 or 554. In some embodiments, the BMPER:BMPRII heteromultimer comprises a polypeptide that is at least 70%, 75%, 80%, 85%, 90%, 91%, 92%, 93%, 94%, 95%, 95%, 96%, 97%, 98%, 99%, or 100% identical to a polypeptide that begins at any one of amino acids of 39-50 of SEQ ID NO: 553 and ends at any one of amino acids 364-369 of SEQ ID NO: 553. In some embodiments, the BMPER:BMPRII heteromultimer comprises a polypeptide that is at least 70%, 75%, 80%, 85%, 90%, 91%, 92%, 93%, 94%, 95%, 95%, 96%, 97%, 98%, 99%, or 100% identical to a polypeptide that begins at any one of amino acids of 370-386 of SEQ ID NO: 553 and ends at any one of amino acids 682-685 of SEQ ID NO: 553. In some embodiments, the BMPER:BMPRII heteromultimer comprises a polypeptide that is at least 70%, 75%, 80%, 85%, 90%, 91%, 92%, 93%, 94%, 95%, 95%, 96%, 97%, 98%, 99%, or 100% identical to a polypeptide that begins at any one of amino acids of 39-50 of SEQ ID NO: 553 and ends at any one of amino acids 682-685 of SEQ ID NO: 553. In some embodiments, the BMPER:BMPRII heteromultimer comprises a BMPER protein, wherein the BMPER protein is a dimer comprising a first polypeptide that is at least 70%, 75%, 80%, 85%, 90%, 91%, 92%, 93%, 94%, 95%, 96%, 97%, 98%, 99%, or 100% identical to a polypeptide that begins at any one of amino acids of 39-50 of SEQ ID NO: 553 and ends at any one of amino acids 364-369 of SEQ ID NO: 553, and second polypeptide that is at least 70%, 75%, 80%, 85%, 90%, 91%, 92%, 93%, 94%, 95%, 96%, 97%, 98%, 99%, or 100% identical to a polypeptide that begins at any one of amino acids of 370-386 of SEQ ID NO: 553, and ends at any one of amino acids 682-685 of SEQ ID NO: 553. In some embodiments, the BMPER:BMPRII heteromultimer comprises a single chain ligand trap that comprises a first BMPER polypeptide domain that is at least 70%, 75%, 80%, 85%, 90%, 91%, 92%, 93%, 94%, 95%, 96%, 97%, 98%, 99%, or 100% identical to a polypeptide that begins at any one of amino acids of 39-50 of SEQ ID NO: 553 and ends at any one of amino acids 364-369 of SEQ ID NO: 553, and second BMPER polypeptide domain that is at least 70%, 75%, 80%, 85%, 90%, 91%, 92%, 93%, 94%, 95%, 96%, 97%, 98%, 99%, or 100% identical to a polypeptide that begins at any one of amino acids of 370-386 of SEQ ID NO: 553 and ends at any one of amino acids 682-685 of SEQ ID NO: 553. In some embodiments, a BMPER:BMPRII heteromultimer comprises a polypeptide that is at least 70%, 75%, 80%, 85%, 90%, 91%, 92%, 93%, 94%, 95%, 95%, 96%, 97%, 98%, 99%, or 100% identical to the amino acid sequence of any one of SEQ ID NOs: 46, 47, 71, or 72. In some embodiments, a BMPER:BMPRII heteromultimer comprises a polypeptide that is at least 70%, 75%, 80%, 85%, 90%, 91%, 92%, 93%, 94%, 95%, 95%, 96%, 97%, 98%, 99%, or 100% identical to a polypeptide that begins at any one of amino acids of 27-34 of SEQ ID NO: 46 and ends at any one of amino acids 123-150 of SEQ ID NO: 46. In some embodiments, a BMPER:BMPRII heteromultimer comprises a polypeptide that is at least 70%, 75%, 80%, 85%, 90%, 91%, 92%, 93%, 94%, 95%, 95%, 96%, 97%, 98%, 99%, or 100% identical to a polypeptide that begins at any one of amino acids of 27-34 of SEQ ID NO: 71 and ends at any one of amino acids 123-150 of SEQ ID NO: 71. In certain preferred embodiments, BMPER:BMPRII heteromultimers are soluble. In some embodiments, a BMPER:BMPRII heteromultimer of the disclosure binds to one or more TGF-beta superfamily ligands (e.g., binds to one or more TGF-beta superfamily ligands with a K_{D} of at least 1×10⁻⁷). In some embodiments, a BMPER:BMPRII heteromultimer of the disclosure inhibits one or more TGF-beta superfamily ligands (e.g., inhibits Smad signaling). Heteromultimer-ligand binding and inhibition may be determined using a variety of assays including, for example, those described herein (e.g., in vitro binding and/or cell-based signaling assays). In some embodiments, a BMPER:BMPRII heteromultimer of the disclosure has a different TGF-beta ligand binding and/or inhibition profile (specificity) compared to a corresponding homomultimer (e.g., BMPER and BMPRII homomultimers). In some embodiments, a BMPER:BMPRII heteromultimer of the disclosure is a heterodimer.

[0135] In certain aspects, the disclosure relates to heteromultimers that comprise at least one BMPER polypeptide, which includes fragments, functional variants, and modified forms thereof, and at least one MISRII polypeptide, which includes fragments, functional variants, and modified forms thereof. In some embodiments, the BMPER:MISRII heteromultimer comprises a polypeptide that is at least 70%, 75%, 80%, 85%, 90%, 91%, 92%, 93%, 94%, 95%, 95%, 96%, 97%, 98%, 99%, or 100% identical to the amino acid sequence of any one of SEQ ID NOs: 553 or 554. In some embodiments, the BMPER:MISRII heteromultimer comprises a polypeptide that is at least 70%, 75%, 80%, 85%, 90%, 91%, 92%, 93%, 94%, 95%, 95%, 96%, 97%, 98%, 99%, or 100% identical to a polypeptide that begins at any one of amino acids of 39-50 of SEQ ID NO: 553 and ends at any one of amino acids 364-369 of SEQ ID NO: 553. In some embodiments, the BMPER:MISRII heteromultimer comprises a polypeptide that is at least 70%, 75%, 80%, 85%, 90%, 91%, 92%, 93%, 94%, 95%, 95%, 96%, 97%, 98%, 99%, or 100% identical to a polypeptide that begins at any one of amino acids of 370-386 of SEQ ID NO: 553 and ends at any one of amino acids 682-685 of SEQ ID NO: 553. In some embodiments, the BMPER:MISRII heteromultimer comprises a polypeptide that is at least 70%, 75%, 80%, 85%, 90%, 91%, 92%, 93%, 94%, 95%, 95%, 96%, 97%, 98%, 99%, or 100% identical to a polypeptide that begins at any one of amino acids of 39-50 of SEQ ID NO: 553 and ends at any one of amino acids 682-685 of SEQ ID NO: 553. In some embodiments, the BMPER:MISRII heteromultimer comprises a BMPER protein, wherein the BMPER protein is a dimer comprising a first polypeptide that is at least 70%, 75%, 80%, 85%, 90%, 91%, 92%, 93%, 94%, 95%, 96%, 97%, 98%, 99%, or 100% identical to a polypeptide that begins at any one of amino acids of 39-50 of SEQ ID NO: 553 and ends at any one of amino acids 364-369 of SEQ ID NO: 553, and second polypeptide that is at least 70%, 75%, 80%, 85%, 90%, 91%, 92%, 93%, 94%, 95%, 96%, 97%, 98%, 99%, or 100% identical to a polypeptide that begins at any one of amino acids of 370-386 of SEQ ID NO: 553, and ends at any one of amino acids 682-685 of SEQ ID NO: 553. In some embodiments, the BMPER:MISRII heteromultimer comprises a single chain ligand trap that comprises a first BMPER polypeptide domain that is at least 70%, 75%, 80%, 85%, 90%, 91%, 92%, 93%, 94%, 95%, 96%, 97%, 98%, 99%, or 100% identical to a polypeptide that begins at any one of amino acids of 39-50 of SEQ ID NO: 553 and ends at any one of amino acids 364-369 of SEQ ID NO: 553, and second BMPER polypeptide domain that is at least 70%, 75%, 80%, 85%, 90%, 91%, 92%, 93%, 94%, 95%, 96%, 97%, 98%, 99%, or 100% identical to a polypeptide that begins at any one of amino acids of 370-386 of SEQ ID NO: 553 and ends at any one of amino acids 682-685 of SEQ ID NO: 553. In some embodiments, a BMPER:MISRII heteromultimer comprises a polypeptide that is at least 70%, 75%, 80%, 85%, 90%, 91%, 92%, 93%, 94%, 95%, 95%, 96%, 97%, 98%, 99%, or 100% identical to the amino acid sequence of any one of SEQ ID NOs: 50, 51, 75, 76, 79, or 80. In some embodiments, a BMPER:MISRII heteromultimer comprises a polypeptide that is at least 70%, 75%, 80%, 85%, 90%, 91%, 92%, 93%, 94%, 95%, 95%, 96%, 97%, 98%, 99%, or 100% identical to a polypeptide that begins at any one of amino acids of 17-24 of SEQ ID NO: 50 and ends at any one of amino acids 116-149 of SEQ ID NO: 50. In some embodiments, a BMPER:MISRII heteromultimer comprises a polypeptide that is at least 70%, 75%, 80%, 85%, 90%, 91%, 92%, 93%, 94%, 95%, 95%, 96%, 97%, 98%, 99%, or 100% identical to a polypeptide that begins at any one of amino acids of 17-24 of SEQ ID NO: 75 and ends at any one of amino acids 116-149 of SEQ ID NO: 75. In some embodiments, a BMPER:MISRII heteromultimer comprises a polypeptide that is at least 70%, 75%, 80%, 85%, 90%, 91%, 92%, 93%, 94%, 95%, 95%, 96%, 97%, 98%, 99%, or 100% identical to a polypeptide that begins at any one of amino acids of 17-24 of SEQ ID NO: 50 and ends at any one of amino acids 116-149 of SEQ ID NO: 79. In certain preferred embodiments, BMPER:MISRII heteromultimers are soluble. In some embodiments, a BMPER:MISRII heteromultimer of the disclosure binds to one or more TGF-beta superfamily ligands (e.g., binds to one or more TGF-beta superfamily ligands with a K_{D} of at least 1×10⁻⁷). In some embodiments, a BMPER:MISRII heteromultimer of the disclosure inhibits one or more TGF-beta superfamily ligands (e.g., inhibits Smad signaling). Heteromultimer-ligand binding and inhibition may be determined using a variety of assays including, for example, those described herein (e.g., in vitro binding and/or cell-based signaling assays). In some embodiments, a BMPER:MISRII heteromultimer of the disclosure has a different TGF-beta ligand binding and/or inhibition profile (specificity) compared to a corresponding homomultimer (e.g., BMPER and MISRII homomultimers). In some embodiments, a BMPER:MISRII heteromultimer of the disclosure is a heterodimer.

[0136] In certain aspects, the disclosure relates to heteromultimers that comprise at least one RGM-A polypeptide, which includes fragments, functional variants, and modified forms thereof, and at least one ActRIIA polypeptide, which includes fragments, functional variants, and modified forms thereof. In some embodiments, the RGM-A:ActRIIA heteromultimer comprises a polypeptide that is at least 70%, 75%, 80%, 85%, 90%, 91%, 92%, 93%, 94%, 95%, 95%, 96%, 97%, 98%, 99%, or 100% identical to the amino acid sequence of any one of SEQ ID NOs: 553 or 554. In some embodiments, the RGM-A:ActRIIA heteromultimer comprises a polypeptide that is at least 70%, 75%, 80%, 85%, 90%, 91%, 92%, 93%, 94%, 95%, 95%, 96%, 97%, 98%, 99%, or 100% identical to a polypeptide that begins at any one of amino acids of 1-177 of SEQ ID NO: 561 and ends at any one of amino acids 430-458 of SEQ ID NO: 561. In some embodiments, the RGM-A:ActRIIA heteromultimer comprises a polypeptide that is at least 70%, 75%, 80%, 85%, 90%, 91%, 92%, 93%, 94%, 95%, 95%, 96%, 97%, 98%, 99%, or 100% identical to a polypeptide that begins at any one of amino acids of 1-153 of SEQ ID NO: 565 and ends at any one of amino acids 406-434 of SEQ ID NO: 565. In some embodiments, the RGM-A:ActRIIA heteromultimer comprises a polypeptide that is at least 70%, 75%, 80%, 85%, 90%, 91%, 92%, 93%, 94%, 95%, 95%, 96%, 97%, 98%, 99%, or 100% identical to a polypeptide that begins at any one of amino acids of 1-169 of SEQ ID NO: 569 and ends at any one of amino acids 422-450 of SEQ ID NO: 569. In some embodiments, a RGM-A:ActRIIA heteromultimer comprises a polypeptide that is at least 70%, 75%, 80%, 85%, 90%, 91%, 92%, 93%, 94%, 95%, 95%, 96%, 97%, 98%, 99%, or 100% identical to the amino acid sequence of any one of SEQ ID NOs: 9, 10, and 11. In some embodiments, a RGM-A:ActRIIA heteromultimer comprises a polypeptide that is at least 70%, 75%, 80%, 85%, 90%, 91%, 92%, 93%, 94%, 95%, 95%, 96%, 97%, 98%, 99%, or 100% identical to a polypeptide that begins at any one of amino acids of 21-30 of SEQ ID NO: 9, and ends at any one of amino acids 110-135 of SEQ ID NO: 9. In certain preferred embodiments, RGM-A:ActRIIA heteromultimers are soluble. In some embodiments, a RGM-A:ActRIIA heteromultimer of the disclosure binds to one or more TGF-beta superfamily ligands (e.g., binds to one or more TGF-beta superfamily ligands with a K_{D} of at least 1×10⁻⁷). In some embodiments, a RGM-A:ActRIIA heteromultimer of the disclosure inhibits one or more TGF-beta superfamily ligands (e.g., inhibits Smad signaling). Heteromultimer-ligand binding and inhibition may be determined using a variety of assays including, for example, those described herein (e.g., in vitro binding and/or cell-based signaling assays). In some embodiments, a RGM-A:ActRIIA heteromultimer of the disclosure has a different TGF-beta ligand binding and/or inhibition profile (specificity) compared to a corresponding homomultimer (e.g., RGM-A and ActRIIA homomultimers). In some embodiments, a RGM-A:ActRIIA heteromultimer of the disclosure is a heterodimer.

[0137] In certain aspects, the disclosure relates to heteromultimers that comprise at least one RGM-A polypeptide, which includes fragments, functional variants, and modified forms thereof, and at least one ActRIIB polypeptide, which includes fragments, functional variants, and modified forms thereof. In some embodiments, the RGM-A:ActRIIB heteromultimer comprises a polypeptide that is at least 70%, 75%, 80%, 85%, 90%, 91%, 92%, 93%, 94%, 95%, 95%, 96%, 97%, 98%, 99%, or 100% identical to the amino acid sequence of any one of SEQ ID NOs: 553 or 554. In some embodiments, the RGM-A:ActRIIB heteromultimer comprises a polypeptide that is at least 70%, 75%, 80%, 85%, 90%, 91%, 92%, 93%, 94%, 95%, 95%, 96%, 97%, 98%, 99%, or 100% identical to a polypeptide that begins at any one of amino acids of 1-177 of SEQ ID NO: 561 and ends at any one of amino acids 430-458 of SEQ ID NO: 561. In some embodiments, the RGM-A:ActRIIB heteromultimer comprises a polypeptide that is at least 70%, 75%, 80%, 85%, 90%, 91%, 92%, 93%, 94%, 95%, 95%, 96%, 97%, 98%, 99%, or 100% identical to a polypeptide that begins at any one of amino acids of 1-153 of SEQ ID NO: 565 and ends at any one of amino acids 406-434 of SEQ ID NO: 565. In some embodiments, the RGM-A:ActRIIB heteromultimer comprises a polypeptide that is at least 70%, 75%, 80%, 85%, 90%, 91%, 92%, 93%, 94%, 95%, 95%, 96%, 97%, 98%, 99%, or 100% identical to a polypeptide that begins at any one of amino acids of 1-169 of SEQ ID NO: 569 and ends at any one of amino acids 422-450 of SEQ ID NO: 569. In some embodiments, a RGM-A:ActRIIB heteromultimer comprises a polypeptide that is at least 70%, 75%, 80%, 85%, 90%, 91%, 92%, 93%, 94%, 95%, 95%, 96%, 97%, 98%, 99%, or 100% identical to the amino acid sequence of any one of SEQ ID NOs: 1, 2, 3, 4, 5, and 6. In some embodiments, a RGM-A:ActRIIB heteromultimer comprises a polypeptide that is at least 70%, 75%, 80%, 85%, 90%, 91%, 92%, 93%, 94%, 95%, 95%, 96%, 97%, 98%, 99%, or 100% identical to a polypeptide that begins at any one of amino acids 20-29 of SEQ ID NO: 1 and ends at a position corresponding to any one of amino acids 109-134 of SEQ ID NO: 1. In some embodiments, a RGM-A:ActRIIB heteromultimer comprises an ActRIIB polypeptide wherein the amino acid position corresponding to L79 of SEQ ID NO: 1 is not an acidic amino acid. In certain preferred embodiments, RGM-A:ActRIIB heteromultimers are soluble. In some embodiments, a RGM-A:ActRIIB heteromultimer of the disclosure binds to one or more TGF-beta superfamily ligands (e.g., binds to one or more TGF-beta superfamily ligands with a K_{D} of at least 1×10⁻⁷). In some embodiments, a RGM-A:ActRIIB heteromultimer of the disclosure inhibits one or more TGF-beta superfamily ligands (e.g., inhibits Smad signaling). Heteromultimer-ligand binding and inhibition may be determined using a variety of assays including, for example, those described herein (e.g., in vitro binding and/or cell-based signaling assays). In some embodiments, a RGM-A:ActRIIB heteromultimer of the disclosure has a different TGF-beta ligand binding and/or inhibition profile (specificity) compared to a corresponding homomultimer (e.g., RGM-A and ActRIIB homomultimers). In some embodiments, a RGM-A:ActRIIB heteromultimer of the disclosure is a heterodimer.

[0138] In certain aspects, the disclosure relates to heteromultimers that comprise at least one RGM-A polypeptide, which includes fragments, functional variants, and modified forms thereof, and at least one TGFBRII polypeptide, which includes fragments, functional variants, and modified forms thereof. In some embodiments, the RGM-A:TGFBRII heteromultimer comprises a polypeptide that is at least 70%, 75%, 80%, 85%, 90%, 91%, 92%, 93%, 94%, 95%, 95%, 96%, 97%, 98%, 99%, or 100% identical to the amino acid sequence of any one of SEQ ID NOs: 553 or 554. In some embodiments, the RGM-A:TGFBRII heteromultimer comprises a polypeptide that is at least 70%, 75%, 80%, 85%, 90%, 91%, 92%, 93%, 94%, 95%, 95%, 96%, 97%, 98%, 99%, or 100% identical to a polypeptide that begins at any one of amino acids of 1-177 of SEQ ID NO: 561 and ends at any one of amino acids 430-458 of SEQ ID NO: 561. In some embodiments, the RGM-A:TGFBRII heteromultimer comprises a polypeptide that is at least 70%, 75%, 80%, 85%, 90%, 91%, 92%, 93%, 94%, 95%, 95%, 96%, 97%, 98%, 99%, or 100% identical to a polypeptide that begins at any one of amino acids of 1-153 of SEQ ID NO: 565 and ends at any one of amino acids 406-434 of SEQ ID NO: 565. In some embodiments, the RGM-A:TGFBRII heteromultimer comprises a polypeptide that is at least 70%, 75%, 80%, 85%, 90%, 91%, 92%, 93%, 94%, 95%, 95%, 96%, 97%, 98%, 99%, or 100% identical to a polypeptide that begins at any one of amino acids of 1-169 of SEQ ID NO: 569 and ends at any one of amino acids 422-450 of SEQ ID NO: 569. In some embodiments, a RGM-A:TGFBRII heteromultimer comprises a polypeptide that is at least 70%, 75%, 80%, 85%, 90%, 91%, 92%, 93%, 94%, 95%, 95%, 96%, 97%, 98%, 99%, or 100% identical to the amino acid sequence of any one of SEQ ID NOs: 42, 43, 67, or 68. In some embodiments, a RGM-A:TGFBRII heteromultimer comprises a polypeptide that is at least 70%, 75%, 80%, 85%, 90%, 91%, 92%, 93%, 94%, 95%, 95%, 96%, 97%, 98%, 99%, or 100% identical to a polypeptide that begins at any one of amino acids of 23-51 of SEQ ID NO: 42 and ends at any one of amino acids 143-166 of SEQ ID NO: 42. In some embodiments, a RGM-A:TGFBRII heteromultimer comprises a polypeptide that is at least 70%, 75%, 80%, 85%, 90%, 91%, 92%, 93%, 94%, 95%, 95%, 96%, 97%, 98%, 99%, or 100% identical to a polypeptide that begins at any one of amino acids of 23-44 of SEQ ID NO: 67 and ends at any one of amino acids 168-191 of SEQ ID NO: 67. In certain preferred embodiments, RGM-A:TGFBRII heteromultimers are soluble. In some embodiments, a RGM-A:TGFBRII heteromultimer of the disclosure binds to one or more TGF-beta superfamily ligands (e.g., binds to one or more TGF-beta superfamily ligands with a K_{D} of at least 1×10⁻⁷). In some embodiments, a RGM-A:TGFBRII heteromultimer of the disclosure inhibits one or more TGF-beta superfamily ligands (e.g., inhibits Smad signaling). Heteromultimer-ligand binding and inhibition may be determined using a variety of assays including, for example, those described herein (e.g., in vitro binding and/or cell-based signaling assays). In some embodiments, a RGM-A:TGFBRII heteromultimer of the disclosure has a different TGF-beta ligand binding and/or inhibition profile (specificity) compared to a corresponding homomultimer (e.g., RGM-A and TGFBRII homomultimers). In some embodiments, a RGM-A:TGFBRII heteromultimer of the disclosure is a heterodimer.

[0139] In certain aspects, the disclosure relates to heteromultimers that comprise at least one RGM-A polypeptide, which includes fragments, functional variants, and modified forms thereof, and at least one BMPRII polypeptide, which includes fragments, functional variants, and modified forms thereof. In some embodiments, the RGM-A:BMPRII heteromultimer comprises a polypeptide that is at least 70%, 75%, 80%, 85%, 90%, 91%, 92%, 93%, 94%, 95%, 95%, 96%, 97%, 98%, 99%, or 100% identical to the amino acid sequence of any one of SEQ ID NOs: 553 or 554. In some embodiments, the RGM-A:BMPRII heteromultimer comprises a polypeptide that is at least 70%, 75%, 80%, 85%, 90%, 91%, 92%, 93%, 94%, 95%, 95%, 96%, 97%, 98%, 99%, or 100% identical to a polypeptide that begins at any one of amino acids of 1-177 of SEQ ID NO: 561 and ends at any one of amino acids 430-458 of SEQ ID NO: 561. In some embodiments, the RGM-A:BMPRII heteromultimer comprises a polypeptide that is at least 70%, 75%, 80%, 85%, 90%, 91%, 92%, 93%, 94%, 95%, 95%, 96%, 97%, 98%, 99%, or 100% identical to a polypeptide that begins at any one of amino acids of 1-153 of SEQ ID NO: 565 and ends at any one of amino acids 406-434 of SEQ ID NO: 565. In some embodiments, the RGM-A:BMPRII heteromultimer comprises a polypeptide that is at least 70%, 75%, 80%, 85%, 90%, 91%, 92%, 93%, 94%, 95%, 95%, 96%, 97%, 98%, 99%, or 100% identical to a polypeptide that begins at any one of amino acids of 1-169 of SEQ ID NO: 569 and ends at any one of amino acids 422-450 of SEQ ID NO: 569. In some embodiments, a RGM-A:BMPRII heteromultimer comprises a polypeptide that is at least 70%, 75%, 80%, 85%, 90%, 91%, 92%, 93%, 94%, 95%, 95%, 96%, 97%, 98%, 99%, or 100% identical to the amino acid sequence of any one of SEQ ID NOs: 46, 47, 71, or 72. In some embodiments, a RGM-A:BMPRII heteromultimer comprises a polypeptide that is at least 70%, 75%, 80%, 85%, 90%, 91%, 92%, 93%, 94%, 95%, 95%, 96%, 97%, 98%, 99%, or 100% identical to a polypeptide that begins at any one of amino acids of 27-34 of SEQ ID NO: 46 and ends at any one of amino acids 123-150 of SEQ ID NO: 46. In some embodiments, a RGM-A:BMPRII heteromultimer comprises a polypeptide that is at least 70%, 75%, 80%, 85%, 90%, 91%, 92%, 93%, 94%, 95%, 95%, 96%, 97%, 98%, 99%, or 100% identical to a polypeptide that begins at any one of amino acids of 27-34 of SEQ ID NO: 71 and ends at any one of amino acids 123-150 of SEQ ID NO: 71. In certain preferred embodiments, RGM-A:BMPRII heteromultimers are soluble. In some embodiments, a RGM-A:BMPRII heteromultimer of the disclosure binds to one or more TGF-beta superfamily ligands (e.g., binds to one or more TGF-beta superfamily ligands with a K_{D} of at least 1×10⁻⁷). In some embodiments, a RGM-A:BMPRII heteromultimer of the disclosure inhibits one or more TGF-beta superfamily ligands (e.g., inhibits Smad signaling). Heteromultimer-ligand binding and inhibition may be determined using a variety of assays including, for example, those described herein (e.g., in vitro binding and/or cell-based signaling assays). In some embodiments, a RGM-A:BMPRII heteromultimer of the disclosure has a different TGF-beta ligand binding and/or inhibition profile (specificity) compared to a corresponding homomultimer (e.g., RGM-A and BMPRII homomultimers). In some embodiments, a RGM-A:BMPRII heteromultimer of the disclosure is a heterodimer.

[0140] In certain aspects, the disclosure relates to heteromultimers that comprise at least one RGM-A polypeptide, which includes fragments, functional variants, and modified forms thereof, and at least one MISRII polypeptide, which includes fragments, functional variants, and modified forms thereof. In some embodiments, the RGM-A:MISRII heteromultimer comprises a polypeptide that is at least 70%, 75%, 80%, 85%, 90%, 91%, 92%, 93%, 94%, 95%, 95%, 96%, 97%, 98%, 99%, or 100% identical to the amino acid sequence of any one of SEQ ID NOs: 553 or 554. In some embodiments, the RGM-A:MISRII heteromultimer comprises a polypeptide that is at least 70%, 75%, 80%, 85%, 90%, 91%, 92%, 93%, 94%, 95%, 95%, 96%, 97%, 98%, 99%, or 100% identical to a polypeptide that begins at any one of amino acids of 1-177 of SEQ ID NO: 561 and ends at any one of amino acids 430-458 of SEQ ID NO: 561. In some embodiments, the RGM-A:MISRII heteromultimer comprises a polypeptide that is at least 70%, 75%, 80%, 85%, 90%, 91%, 92%, 93%, 94%, 95%, 95%, 96%, 97%, 98%, 99%, or 100% identical to a polypeptide that begins at any one of amino acids of 1-153 of SEQ ID NO: 565 and ends at any one of amino acids 406-434 of SEQ ID NO: 565. In some embodiments, the RGM-A:MISRII heteromultimer comprises a polypeptide that is at least 70%, 75%, 80%, 85%, 90%, 91%, 92%, 93%, 94%, 95%, 95%, 96%, 97%, 98%, 99%, or 100% identical to a polypeptide that begins at any one of amino acids of 1-169 of SEQ ID NO: 569 and ends at any one of amino acids 422-450 of SEQ ID NO: 569. In some embodiments, a RGM-A:MISRII heteromultimer comprises a polypeptide that is at least 70%, 75%, 80%, 85%, 90%, 91%, 92%, 93%, 94%, 95%, 95%, 96%, 97%, 98%, 99%, or 100% identical to the amino acid sequence of any one of SEQ ID NOs: 50, 51, 75, 76, 79, or 80. In some embodiments, a RGM-A:MISRII heteromultimer comprises a polypeptide that is at least 70%, 75%, 80%, 85%, 90%, 91%, 92%, 93%, 94%, 95%, 95%, 96%, 97%, 98%, 99%, or 100% identical to a polypeptide that begins at any one of amino acids of 17-24 of SEQ ID NO: 50 and ends at any one of amino acids 116-149 of SEQ ID NO: 50. In some embodiments, a RGM-A:MISRII heteromultimer comprises a polypeptide that is at least 70%, 75%, 80%, 85%, 90%, 91%, 92%, 93%, 94%, 95%, 95%, 96%, 97%, 98%, 99%, or 100% identical to a polypeptide that begins at any one of amino acids of 17-24 of SEQ ID NO: 75 and ends at any one of amino acids 116-149 of SEQ ID NO: 75. In some embodiments, a RGM-A:MISRII heteromultimer comprises a polypeptide that is at least 70%, 75%, 80%, 85%, 90%, 91%, 92%, 93%, 94%, 95%, 95%, 96%, 97%, 98%, 99%, or 100% identical to a polypeptide that begins at any one of amino acids of 17-24 of SEQ ID NO: 50 and ends at any one of amino acids 116-149 of SEQ ID NO: 79. In certain preferred embodiments, RGM-A:MISRII heteromultimers are soluble. In some embodiments, a RGM-A:MISRII heteromultimer of the disclosure binds to one or more TGF-beta superfamily ligands (e.g., binds to one or more TGF-beta superfamily ligands with a K_{D} of at least 1×10⁻⁷). In some embodiments, a RGM-A:MISRII heteromultimer of the disclosure inhibits one or more TGF-beta superfamily ligands (e.g., inhibits Smad signaling). Heteromultimer-ligand binding and inhibition may be determined using a variety of assays including, for example, those described herein (e.g., in vitro binding and/or cell-based signaling assays). In some embodiments, a RGM-A:MISRII heteromultimer of the disclosure has a different TGF-beta ligand binding and/or inhibition profile (specificity) compared to a corresponding homomultimer (e.g., RGM-A and MISRII homomultimers). In some embodiments, a RGM-A:MISRII heteromultimer of the disclosure is a heterodimer.

[0141] In certain aspects, the disclosure relates to heteromultimers that comprise at least one RGM-B polypeptide, which includes fragments, functional variants, and modified forms thereof, and at least one ActRIIA polypeptide, which includes fragments, functional variants, and modified forms thereof. In some embodiments, the RGM-B:ActRIIA heteromultimer comprises a polypeptide that is at least 70%, 75%, 80%, 85%, 90%, 91%, 92%, 93%, 94%, 95%, 95%, 96%, 97%, 98%, 99%, or 100% identical to the amino acid sequence of any one of SEQ ID NOs: 557 or 558. In some embodiments, the RGM-B:ActRIIA heteromultimer comprises a polypeptide that is at least 70%, 75%, 80%, 85%, 90%, 91%, 92%, 93%, 94%, 95%, 95%, 96%, 97%, 98%, 99%, or 100% identical to a polypeptide that begins at any one of amino acids of 1-87 of SEQ ID NO: 557 and ends at any one of amino acids 452-478 of SEQ ID NO: 557. In some embodiments, the RGM-B:ActRIIA heteromultimer comprises a polypeptide that is at least 70%, 75%, 80%, 85%, 90%, 91%, 92%, 93%, 94%, 95%, 95%, 96%, 97%, 98%, 99%, or 100% identical to a polypeptide that begins at any one of amino acids of 210-222 of SEQ ID NO: 557 and ends at any one of amino acids 413-452 of SEQ ID NO: 557. In some embodiments, the RGM-B:ActRIIA heteromultimer comprises a polypeptide that is at least 70%, 75%, 80%, 85%, 90%, 91%, 92%, 93%, 94%, 95%, 95%, 96%, 97%, 98%, 99%, or 100% identical to a polypeptide that begins at any one of amino acids of 87-95 of SEQ ID NO: 557 and ends at any one of amino acids 204-209 of SEQ ID NO: 557. In some embodiments, the RGM-B:ActRIIA heteromultimer comprises a RGM-B protein, wherein the RGM-B protein is a dimer comprising a first polypeptide that is at least 70%, 75%, 80%, 85%, 90%, 91%, 92%, 93%, 94%, 95%, 96%, 97%, 98%, 99%, or 100% identical to a polypeptide that begins at any one of amino acids of 87-95 of SEQ ID NO: 557 and ends at any one of amino acids 204-209 of SEQ ID NO: 557 and second polypeptide that is at least 70%, 75%, 80%, 85%, 90%, 91%, 92%, 93%, 94%, 95%, 96%, 97%, 98%, 99%, or 100% identical to a polypeptide that begins at any one of amino acids of 210-222 of SEQ ID NO: 557 and ends at any one of amino acids 413-452 of SEQ ID NO: 557. In some embodiments, the RGM-B:ActRIIA heteromultimer comprises a single chain ligand trap that comprises a first RGM-B polypeptide domain that is at least 70%, 75%, 80%, 85%, 90%, 91%, 92%, 93%, 94%, 95%, 96%, 97%, 98%, 99%, or 100% identical to a polypeptide that begins at any one of amino acids of 87-95 of SEQ ID NO: 557 and ends at any one of amino acids 204-209 of SEQ ID NO: 557 and second RGM-B polypeptide domain that is at least 70%, 75%, 80%, 85%, 90%, 91%, 92%, 93%, 94%, 95%, 96%, 97%, 98%, 99%, or 100% identical to a polypeptide that begins at any one of amino acids of 210-222 of SEQ ID NO: 557 and ends at any one of amino acids 413-452 of SEQ ID NO: 557. In some embodiments, a RGM-B:ActRIIA heteromultimer comprises a polypeptide that is at least 70%, 75%, 80%, 85%, 90%, 91%, 92%, 93%, 94%, 95%, 95%, 96%, 97%, 98%, 99%, or 100% identical to the amino acid sequence of any one of SEQ ID NOs: 9, 10, and 11. In some embodiments, a RGM-B:ActRIIA heteromultimer comprises a polypeptide that is at least 70%, 75%, 80%, 85%, 90%, 91%, 92%, 93%, 94%, 95%, 95%, 96%, 97%, 98%, 99%, or 100% identical to a polypeptide that begins at any one of amino acids of 21-30 of SEQ ID NO: 9, and ends at any one of amino acids 110-135 of SEQ ID NO: 9. In certain preferred embodiments, RGM-B:ActRIIA heteromultimers are soluble. In some embodiments, a RGM-B:ActRIIA heteromultimer of the disclosure binds to one or more TGF-beta superfamily ligands (e.g., binds to one or more TGF-beta superfamily ligands with a K_{D} of at least 1×10⁻⁷). In some embodiments, a RGM-B:ActRIIA heteromultimer of the disclosure inhibits one or more TGF-beta superfamily ligands (e.g., inhibits Smad signaling). Heteromultimer-ligand binding and inhibition may be determined using a variety of assays including, for example, those described herein (e.g., in vitro binding and/or cell-based signaling assays). In some embodiments, a RGM-B:ActRIIA heteromultimer of the disclosure has a different TGF-beta ligand binding and/or inhibition profile (specificity) compared to a corresponding homomultimer (e.g., RGM-B and ActRIIA homomultimers). In some embodiments, a RGM-B:ActRIIA heteromultimer of the disclosure is a heterodimer.

[0142] In certain aspects, the disclosure relates to heteromultimers that comprise at least one RGM-B polypeptide, which includes fragments, functional variants, and modified forms thereof, and at least one ActRIIB polypeptide, which includes fragments, functional variants, and modified forms thereof. In some embodiments, the RGM-B:ActRIIB heteromultimer comprises a polypeptide that is at least 70%, 75%, 80%, 85%, 90%, 91%, 92%, 93%, 94%, 95%, 95%, 96%, 97%, 98%, 99%, or 100% identical to the amino acid sequence of any one of SEQ ID NOs: 557 or 558. In some embodiments, the RGM-B:ActRIIB heteromultimer comprises a polypeptide that is at least 70%, 75%, 80%, 85%, 90%, 91%, 92%, 93%, 94%, 95%, 95%, 96%, 97%, 98%, 99%, or 100% identical to a polypeptide that begins at any one of amino acids of 1-87 of SEQ ID NO: 557 and ends at any one of amino acids 452-478 of SEQ ID NO: 557. In some embodiments, the RGM-B:ActRIIB heteromultimer comprises a polypeptide that is at least 70%, 75%, 80%, 85%, 90%, 91%, 92%, 93%, 94%, 95%, 95%, 96%, 97%, 98%, 99%, or 100% identical to a polypeptide that begins at any one of amino acids of 210-222 of SEQ ID NO: 557 and ends at any one of amino acids 413-452 of SEQ ID NO: 557. In some embodiments, the RGM-B:ActRIIB heteromultimer comprises a polypeptide that is at least 70%, 75%, 80%, 85%, 90%, 91%, 92%, 93%, 94%, 95%, 95%, 96%, 97%, 98%, 99%, or 100% identical to a polypeptide that begins at any one of amino acids of 87-95 of SEQ ID NO: 557 and ends at any one of amino acids 204-209 of SEQ ID NO: 557. In some embodiments, the RGM-B:ActRIIB heteromultimer comprises a RGM-B protein, wherein the RGM-B protein is a dimer comprising a first polypeptide that is at least 70%, 75%, 80%, 85%, 90%, 91%, 92%, 93%, 94%, 95%, 96%, 97%, 98%, 99%, or 100% identical to a polypeptide that begins at any one of amino acids of 87-95 of SEQ ID NO: 557 and ends at any one of amino acids 204-209 of SEQ ID NO: 557 and second polypeptide that is at least 70%, 75%, 80%, 85%, 90%, 91%, 92%, 93%, 94%, 95%, 96%, 97%, 98%, 99%, or 100% identical to a polypeptide that begins at any one of amino acids of 210-222 of SEQ ID NO: 557 and ends at any one of amino acids 413-452 of SEQ ID NO: 557. In some embodiments, the RGM-B:ActRIIB heteromultimer comprises a single chain ligand trap that comprises a first RGM-B polypeptide domain that is at least 70%, 75%, 80%, 85%, 90%, 91%, 92%, 93%, 94%, 95%, 96%, 97%, 98%, 99%, or 100% identical to a polypeptide that begins at any one of amino acids of 87-95 of SEQ ID NO: 557 and ends at any one of amino acids 204-209 of SEQ ID NO: 557 and second RGM-B polypeptide domain that is at least 70%, 75%, 80%, 85%, 90%, 91%, 92%, 93%, 94%, 95%, 96%, 97%, 98%, 99%, or 100% identical to a polypeptide that begins at any one of amino acids of 210-222 of SEQ ID NO: 557 and ends at any one of amino acids 413-452 of SEQ ID NO: 557. In some embodiments, a RGM-B:ActRIIB heteromultimer comprises a polypeptide that is at least 70%, 75%, 80%, 85%, 90%, 91%, 92%, 93%, 94%, 95%, 95%, 96%, 97%, 98%, 99%, or 100% identical to the amino acid sequence of any one of SEQ ID NOs: 1, 2, 3, 4, 5, and 6. In some embodiments, a RGM-B:ActRIIB heteromultimer comprises a polypeptide that is at least 70%, 75%, 80%, 85%, 90%, 91%, 92%, 93%, 94%, 95%, 95%, 96%, 97%, 98%, 99%, or 100% identical to a polypeptide that begins at any one of amino acids 20-29 of SEQ ID NO: 1 and ends at a position corresponding to any one of amino acids 109-134 of SEQ ID NO: 1. In some embodiments, a RGM-B:ActRIIB heteromultimer comprises an ActRIIB polypeptide wherein the amino acid position corresponding to L79 of SEQ ID NO: 1 is not an acidic amino acid. In certain preferred embodiments, RGM-B:ActRIIB heteromultimers are soluble. In some embodiments, a RGM-B:ActRIIB heteromultimer of the disclosure binds to one or more TGF-beta superfamily ligands (e.g., binds to one or more TGF-beta superfamily ligands with a K_{D} of at least 1×10⁻⁷). In some embodiments, a RGM-B:ActRIIB heteromultimer of the disclosure inhibits one or more TGF-beta superfamily ligands (e.g., inhibits Smad signaling). Heteromultimer-ligand binding and inhibition may be determined using a variety of assays including, for example, those described herein (e.g., in vitro binding and/or cell-based signaling assays). In some embodiments, a RGM-B:ActRIIB heteromultimer of the disclosure has a different TGF-beta ligand binding and/or inhibition profile (specificity) compared to a corresponding homomultimer (e.g., RGM-B and ActRIIB homomultimers). In some embodiments, a RGM-B:ActRIIB heteromultimer of the disclosure is a heterodimer.

[0143] In certain aspects, the disclosure relates to heteromultimers that comprise at least one RGM-B polypeptide, which includes fragments, functional variants, and modified forms thereof, and at least one TGFBRII polypeptide, which includes fragments, functional variants, and modified forms thereof. In some embodiments, the RGM-B:TGFBRII heteromultimer comprises a polypeptide that is at least 70%, 75%, 80%, 85%, 90%, 91%, 92%, 93%, 94%, 95%, 95%, 96%, 97%, 98%, 99%, or 100% identical to the amino acid sequence of any one of SEQ ID NOs: 557 or 558. In some embodiments, the RGM-B:TGFBRII heteromultimer comprises a polypeptide that is at least 70%, 75%, 80%, 85%, 90%, 91%, 92%, 93%, 94%, 95%, 95%, 96%, 97%, 98%, 99%, or 100% identical to a polypeptide that begins at any one of amino acids of 1-87 of SEQ ID NO: 557 and ends at any one of amino acids 452-478 of SEQ ID NO: 557. In some embodiments, the RGM-B:TGFBRII heteromultimer comprises a polypeptide that is at least 70%, 75%, 80%, 85%, 90%, 91%, 92%, 93%, 94%, 95%, 95%, 96%, 97%, 98%, 99%, or 100% identical to a polypeptide that begins at any one of amino acids of 210-222 of SEQ ID NO: 557 and ends at any one of amino acids 413-452 of SEQ ID NO: 557. In some embodiments, the RGM-B:TGFBRII heteromultimer comprises a polypeptide that is at least 70%, 75%, 80%, 85%, 90%, 91%, 92%, 93%, 94%, 95%, 95%, 96%, 97%, 98%, 99%, or 100% identical to a polypeptide that begins at any one of amino acids of 87-95 of SEQ ID NO: 557 and ends at any one of amino acids 204-209 of SEQ ID NO: 557. In some embodiments, the RGM-B:TGFBRII heteromultimer comprises a RGM-B protein, wherein the RGM-B protein is a dimer comprising a first polypeptide that is at least 70%, 75%, 80%, 85%, 90%, 91%, 92%, 93%, 94%, 95%, 96%, 97%, 98%, 99%, or 100% identical to a polypeptide that begins at any one of amino acids of 87-95 of SEQ ID NO: 557 and ends at any one of amino acids 204-209 of SEQ ID NO: 557 and second polypeptide that is at least 70%, 75%, 80%, 85%, 90%, 91%, 92%, 93%, 94%, 95%, 96%, 97%, 98%, 99%, or 100% identical to a polypeptide that begins at any one of amino acids of 210-222 of SEQ ID NO: 557 and ends at any one of amino acids 413-452 of SEQ ID NO: 557. In some embodiments, the RGM-B:TGFBRII heteromultimer comprises a single chain ligand trap that comprises a first RGM-B polypeptide domain that is at least 70%, 75%, 80%, 85%, 90%, 91%, 92%, 93%, 94%, 95%, 96%, 97%, 98%, 99%, or 100% identical to a polypeptide that begins at any one of amino acids of 87-95 of SEQ ID NO: 557 and ends at any one of amino acids 204-209 of SEQ ID NO: 557 and second RGM-B polypeptide domain that is at least 70%, 75%, 80%, 85%, 90%, 91%, 92%, 93%, 94%, 95%, 96%, 97%, 98%, 99%, or 100% identical to a polypeptide that begins at any one of amino acids of 210-222 of SEQ ID NO: 557 and ends at any one of amino acids 413-452 of SEQ ID NO: 557. In some embodiments, a RGM-B:TGFBRII heteromultimer comprises a polypeptide that is at least 70%, 75%, 80%, 85%, 90%, 91%, 92%, 93%, 94%, 95%, 95%, 96%, 97%, 98%, 99%, or 100% identical to the amino acid sequence of any one of SEQ ID NOs: 42, 43, 67, or 68. In some embodiments, a RGM-B:TGFBRII heteromultimer comprises a polypeptide that is at least 70%, 75%, 80%, 85%, 90%, 91%, 92%, 93%, 94%, 95%, 95%, 96%, 97%, 98%, 99%, or 100% identical to a polypeptide that begins at any one of amino acids of 23-51 of SEQ ID NO: 42 and ends at any one of amino acids 143-166 of SEQ ID NO: 42. In some embodiments, a RGM-B:TGFBRII heteromultimer comprises a polypeptide that is at least 70%, 75%, 80%, 85%, 90%, 91%, 92%, 93%, 94%, 95%, 95%, 96%, 97%, 98%, 99%, or 100% identical to a polypeptide that begins at any one of amino acids of 23-44 of SEQ ID NO: 67 and ends at any one of amino acids 168-191 of SEQ ID NO: 67. In certain preferred embodiments, RGM-B:TGFBRII heteromultimers are soluble. In some embodiments, a RGM-B:TGFBRII heteromultimer of the disclosure binds to one or more TGF-beta superfamily ligands (e.g., binds to one or more TGF-beta superfamily ligands with a K_{D} of at least 1×10⁻⁷). In some embodiments, a RGM-B:TGFBRII heteromultimer of the disclosure inhibits one or more TGF-beta superfamily ligands (e.g., inhibits Smad signaling). Heteromultimer-ligand binding and inhibition may be determined using a variety of assays including, for example, those described herein (e.g., in vitro binding and/or cell-based signaling assays). In some embodiments, a RGM-B:TGFBRII heteromultimer of the disclosure has a different TGF-beta ligand binding and/or inhibition profile (specificity) compared to a corresponding homomultimer (e.g., RGM-B and TGFBRII homomultimers). In some embodiments, a RGM-B:TGFBRII heteromultimer of the disclosure is a heterodimer.

[0144] In certain aspects, the disclosure relates to heteromultimers that comprise at least one RGM-B polypeptide, which includes fragments, functional variants, and modified forms thereof, and at least one BMPRII polypeptide, which includes fragments, functional variants, and modified forms thereof. In some embodiments, the RGM-B:BMPRII heteromultimer comprises a polypeptide that is at least 70%, 75%, 80%, 85%, 90%, 91%, 92%, 93%, 94%, 95%, 95%, 96%, 97%, 98%, 99%, or 100% identical to the amino acid sequence of any one of SEQ ID NOs: 557 or 558. In some embodiments, the RGM-B:BMPRII heteromultimer comprises a polypeptide that is at least 70%, 75%, 80%, 85%, 90%, 91%, 92%, 93%, 94%, 95%, 95%, 96%, 97%, 98%, 99%, or 100% identical to a polypeptide that begins at any one of amino acids of 1-87 of SEQ ID NO: 557 and ends at any one of amino acids 452-478 of SEQ ID NO: 557. In some embodiments, the RGM-B:BMPRII heteromultimer comprises a polypeptide that is at least 70%, 75%, 80%, 85%, 90%, 91%, 92%, 93%, 94%, 95%, 95%, 96%, 97%, 98%, 99%, or 100% identical to a polypeptide that begins at any one of amino acids of 210-222 of SEQ ID NO: 557 and ends at any one of amino acids 413-452 of SEQ ID NO: 557. In some embodiments, the RGM-B:BMPRII heteromultimer comprises a polypeptide that is at least 70%, 75%, 80%, 85%, 90%, 91%, 92%, 93%, 94%, 95%, 95%, 96%, 97%, 98%, 99%, or 100% identical to a polypeptide that begins at any one of amino acids of 87-95 of SEQ ID NO: 557 and ends at any one of amino acids 204-209 of SEQ ID NO: 557. In some embodiments, the RGM-B:BMPRII heteromultimer comprises a RGM-B protein, wherein the RGM-B protein is a dimer comprising a first polypeptide that is at least 70%, 75%, 80%, 85%, 90%, 91%, 92%, 93%, 94%, 95%, 96%, 97%, 98%, 99%, or 100% identical to a polypeptide that begins at any one of amino acids of 87-95 of SEQ ID NO: 557 and ends at any one of amino acids 204-209 of SEQ ID NO: 557 and second polypeptide that is at least 70%, 75%, 80%, 85%, 90%, 91%, 92%, 93%, 94%, 95%, 96%, 97%, 98%, 99%, or 100% identical to a polypeptide that begins at any one of amino acids of 210-222 of SEQ ID NO: 557 and ends at any one of amino acids 413-452 of SEQ ID NO: 557. In some embodiments, the RGM-B:BMPRII heteromultimer comprises a single chain ligand trap that comprises a first RGM-B polypeptide domain that is at least 70%, 75%, 80%, 85%, 90%, 91%, 92%, 93%, 94%, 95%, 96%, 97%, 98%, 99%, or 100% identical to a polypeptide that begins at any one of amino acids of 87-95 of SEQ ID NO: 557 and ends at any one of amino acids 204-209 of SEQ ID NO: 557 and second RGM-B polypeptide domain that is at least 70%, 75%, 80%, 85%, 90%, 91%, 92%, 93%, 94%, 95%, 96%, 97%, 98%, 99%, or 100% identical to a polypeptide that begins at any one of amino acids of 210-222 of SEQ ID NO: 557 and ends at any one of amino acids 413-452 of SEQ ID NO: 557. In some embodiments, a RGM-B:BMPRII heteromultimer comprises a polypeptide that is at least 70%, 75%, 80%, 85%, 90%, 91%, 92%, 93%, 94%, 95%, 95%, 96%, 97%, 98%, 99%, or 100% identical to the amino acid sequence of any one of SEQ ID NOs: 46, 47, 71, or 72. In some embodiments, a RGM-B:BMPRII heteromultimer comprises a polypeptide that is at least 70%, 75%, 80%, 85%, 90%, 91%, 92%, 93%, 94%, 95%, 95%, 96%, 97%, 98%, 99%, or 100% identical to a polypeptide that begins at any one of amino acids of 27-34 of SEQ ID NO: 46 and ends at any one of amino acids 123-150 of SEQ ID NO: 46. In some embodiments, a RGM-B:BMPRII heteromultimer comprises a polypeptide that is at least 70%, 75%, 80%, 85%, 90%, 91%, 92%, 93%, 94%, 95%, 95%, 96%, 97%, 98%, 99%, or 100% identical to a polypeptide that begins at any one of amino acids of 27-34 of SEQ ID NO: 71 and ends at any one of amino acids 123-150 of SEQ ID NO: 71. In certain preferred embodiments, RGM-B:BMPRII heteromultimers are soluble. In some embodiments, a RGM-B:BMPRII heteromultimer of the disclosure binds to one or more TGF-beta superfamily ligands (e.g., binds to one or more TGF-beta superfamily ligands with a K_{D} of at least 1×10⁻⁷). In some embodiments, a RGM-B:BMPRII heteromultimer of the disclosure inhibits one or more TGF-beta superfamily ligands (e.g., inhibits Smad signaling). Heteromultimer-ligand binding and inhibition may be determined using a variety of assays including, for example, those described herein (e.g., in vitro binding and/or cell-based signaling assays). In some embodiments, a RGM-B:BMPRII heteromultimer of the disclosure has a different TGF-beta ligand binding and/or inhibition profile (specificity) compared to a corresponding homomultimer (e.g., RGM-B and BMPRII homomultimers). In some embodiments, a RGM-B:BMPRII heteromultimer of the disclosure is a heterodimer.

[0145] In certain aspects, the disclosure relates to heteromultimers that comprise at least one RGM-B polypeptide, which includes fragments, functional variants, and modified forms thereof, and at least one MISRII polypeptide, which includes fragments, functional variants, and modified forms thereof. In some embodiments, the RGM-B:MISRII heteromultimer comprises a polypeptide that is at least 70%, 75%, 80%, 85%, 90%, 91%, 92%, 93%, 94%, 95%, 95%, 96%, 97%, 98%, 99%, or 100% identical to the amino acid sequence of any one of SEQ ID NOs: 557 or 558. In some embodiments, the RGM-B:MISRII heteromultimer comprises a polypeptide that is at least 70%, 75%, 80%, 85%, 90%, 91%, 92%, 93%, 94%, 95%, 95%, 96%, 97%, 98%, 99%, or 100% identical to a polypeptide that begins at any one of amino acids of 1-87 of SEQ ID NO: 557 and ends at any one of amino acids 452-478 of SEQ ID NO: 557. In some embodiments, the RGM-B:MISRII heteromultimer comprises a polypeptide that is at least 70%, 75%, 80%, 85%, 90%, 91%, 92%, 93%, 94%, 95%, 95%, 96%, 97%, 98%, 99%, or 100% identical to a polypeptide that begins at any one of amino acids of 210-222 of SEQ ID NO: 557 and ends at any one of amino acids 413-452 of SEQ ID NO: 557. In some embodiments, the RGM-B:MISRII heteromultimer comprises a polypeptide that is at least 70%, 75%, 80%, 85%, 90%, 91%, 92%, 93%, 94%, 95%, 95%, 96%, 97%, 98%, 99%, or 100% identical to a polypeptide that begins at any one of amino acids of 87-95 of SEQ ID NO: 557 and ends at any one of amino acids 204-209 of SEQ ID NO: 557. In some embodiments, the RGM-B:MISRII heteromultimer comprises a RGM-B protein, wherein the RGM-B protein is a dimer comprising a first polypeptide that is at least 70%, 75%, 80%, 85%, 90%, 91%, 92%, 93%, 94%, 95%, 96%, 97%, 98%, 99%, or 100% identical to a polypeptide that begins at any one of amino acids of 87-95 of SEQ ID NO: 557 and ends at any one of amino acids 204-209 of SEQ ID NO: 557 and second polypeptide that is at least 70%, 75%, 80%, 85%, 90%, 91%, 92%, 93%, 94%, 95%, 96%, 97%, 98%, 99%, or 100% identical to a polypeptide that begins at any one of amino acids of 210-222 of SEQ ID NO: 557 and ends at any one of amino acids 413-452 of SEQ ID NO: 557. In some embodiments, the RGM-B:MISRII heteromultimer comprises a single chain ligand trap that comprises a first RGM-B polypeptide domain that is at least 70%, 75%, 80%, 85%, 90%, 91%, 92%, 93%, 94%, 95%, 96%, 97%, 98%, 99%, or 100% identical to a polypeptide that begins at any one of amino acids of 87-95 of SEQ ID NO: 557 and ends at any one of amino acids 204-209 of SEQ ID NO: 557 and second RGM-B polypeptide domain that is at least 70%, 75%, 80%, 85%, 90%, 91%, 92%, 93%, 94%, 95%, 96%, 97%, 98%, 99%, or 100% identical to a polypeptide that begins at any one of amino acids of 210-222 of SEQ ID NO: 557 and ends at any one of amino acids 413-452 of SEQ ID NO: 557. In some embodiments, a RGM-B:MISRII heteromultimer comprises a polypeptide that is at least 70%, 75%, 80%, 85%, 90%, 91%, 92%, 93%, 94%, 95%, 95%, 96%, 97%, 98%, 99%, or 100% identical to the amino acid sequence of any one of SEQ ID NOs: 50, 51, 75, 76, 79, or 80. In some embodiments, a RGM-B:MISRII heteromultimer comprises a polypeptide that is at least 70%, 75%, 80%, 85%, 90%, 91%, 92%, 93%, 94%, 95%, 95%, 96%, 97%, 98%, 99%, or 100% identical to a polypeptide that begins at any one of amino acids of 17-24 of SEQ ID NO: 50 and ends at any one of amino acids 116-149 of SEQ ID NO: 50. In some embodiments, a RGM-B:MISRII heteromultimer comprises a polypeptide that is at least 70%, 75%, 80%, 85%, 90%, 91%, 92%, 93%, 94%, 95%, 95%, 96%, 97%, 98%, 99%, or 100% identical to a polypeptide that begins at any one of amino acids of 17-24 of SEQ ID NO: 75 and ends at any one of amino acids 116-149 of SEQ ID NO: 75. In some embodiments, a RGM-B:MISRII heteromultimer comprises a polypeptide that is at least 70%, 75%, 80%, 85%, 90%, 91%, 92%, 93%, 94%, 95%, 95%, 96%, 97%, 98%, 99%, or 100% identical to a polypeptide that begins at any one of amino acids of 17-24 of SEQ ID NO: 50 and ends at any one of amino acids 116-149 of SEQ ID NO: 79. In certain preferred embodiments, RGM-B:MISRII heteromultimers are soluble. In some embodiments, a RGM-B:MISRII heteromultimer of the disclosure binds to one or more TGF-beta superfamily ligands (e.g., binds to one or more TGF-beta superfamily ligands with a K_{D} of at least 1×10⁻⁷). In some embodiments, a RGM-B:MISRII heteromultimer of the disclosure inhibits one or more TGF-beta superfamily ligands (e.g., inhibits Smad signaling). Heteromultimer-ligand binding and inhibition may be determined using a variety of assays including, for example, those described herein (e.g., in vitro binding and/or cell-based signaling assays). In some embodiments, a RGM-B:MISRII heteromultimer of the disclosure has a different TGF-beta ligand binding and/or inhibition profile (specificity) compared to a corresponding homomultimer (e.g., RGM-B and MISRII homomultimers). In some embodiments, a RGM-B:MISRII heteromultimer of the disclosure is a heterodimer.

[0146] In certain aspects, the disclosure relates to heteromultimers that comprise at least one hemojuvelin polypeptide, which includes fragments, functional variants, and modified forms thereof, and at least one ActRIIA polypeptide, which includes fragments, functional variants, and modified forms thereof. In some embodiments, the hemojuvelin:ActRIIA heteromultimer comprises a polypeptide that is at least 70%, 75%, 80%, 85%, 90%, 91%, 92%, 93%, 94%, 95%, 95%, 96%, 97%, 98%, 99%, or 100% identical to the amino acid sequence of any one of SEQ ID NOs: 573, 574, 577, 578, 581, or 582. In some embodiments, the hemojuvelin:ActRIIA heteromultimer comprises a polypeptide that is at least 70%, 75%, 80%, 85%, 90%, 91%, 92%, 93%, 94%, 95%, 95%, 96%, 97%, 98%, 99%, or 100% identical to a polypeptide that begins at any one of amino acids of 1-36 of SEQ ID NO: 573 and ends at any one of amino acids 400-426 of SEQ ID NO: 573. In some embodiments, the hemojuvelin:ActRIIA heteromultimer comprises a polypeptide that is at least 70%, 75%, 80%, 85%, 90%, 91%, 92%, 93%, 94%, 95%, 95%, 96%, 97%, 98%, 99%, or 100% identical to a polypeptide that begins at any one of amino acids of 36-42 of SEQ ID NO: 573 and ends at any one of amino acids 167-172 of SEQ ID NO: 573. In some embodiments, the hemojuvelin:ActRIIA heteromultimer comprises a polypeptide that is at least 70%, 75%, 80%, 85%, 90%, 91%, 92%, 93%, 94%, 95%, 95%, 96%, 97%, 98%, 99%, or 100% identical to a polypeptide that begins at any one of amino acids of 173-185 of SEQ ID NO: 573 and ends at any one of amino acids 361-400 of SEQ ID NO: 573. In some embodiments, the hemojuvelin:ActRIIA heteromultimer comprises a hemojuvelin protein that is a dimer comprising a first polypeptide that is at least 70%, 75%, 80%, 85%, 90%, 91%, 92%, 93%, 94%, 95%, 96%, 97%, 98%, 99%, or 100% identical to a polypeptide that begins at any one of amino acids of 36-42 of SEQ ID NO: 573, and ends at any one of amino acids 167-172 of SEQ ID NO: 573 and second polypeptide that is at least 70%, 75%, 80%, 85%, 90%, 91%, 92%, 93%, 94%, 95%, 96%, 97%, 98%, 99%, or 100% identical to a polypeptide that begins at any one of amino acids of 173-185 of SEQ ID NO: 573 and ends at any one of amino acids 361-400 of SEQ ID NO: 573. In some embodiments, the hemojuvelin:ActRIIA heteromultimer comprises a single chain ligand trap that comprises a first hemojuvelin polypeptide domain that is at least 70%, 75%, 80%, 85%, 90%, 91%, 92%, 93%, 94%, 95%, 96%, 97%, 98%, 99%, or 100% identical to a polypeptide that begins at any one of amino acids of 36-42 of SEQ ID NO: 573 and ends at any one of amino acids 167-172 of SEQ ID NO: 573 and second hemojuvelin polypeptide domain that is at least 70%, 75%, 80%, 85%, 90%, 91%, 92%, 93%, 94%, 95%, 96%, 97%, 98%, 99%, or 100% identical to a polypeptide that begins at any one of amino acids of 173-185 of SEQ ID NO: 573 and ends at any one of amino acids 361-400 of SEQ ID NO: 573. In some embodiments, the hemojuvelin:ActRIIA heteromultimer comprises a polypeptide that is at least 70%, 75%, 80%, 85%, 90%, 91%, 92%, 93%, 94%, 95%, 95%, 96%, 97%, 98%, 99%, or 100% identical to a polypeptide that begins at any one of amino acids of 1-6 of SEQ ID NO: 577 and ends at any one of amino acids 287-313 of SEQ ID NO: 577. In some embodiments, the hemojuvelin:ActRIIA heteromultimer comprises a polypeptide that is at least 70%, 75%, 80%, 85%, 90%, 91%, 92%, 93%, 94%, 95%, 95%, 96%, 97%, 98%, 99%, or 100% identical to a polypeptide that begins at any one of amino acids of 1-6 of SEQ ID NO: 577 and ends at any one of amino acids 54-59 of SEQ ID NO: 577. In some embodiments, the hemojuvelin:ActRIIA heteromultimer comprises a polypeptide that is at least 70%, 75%, 80%, 85%, 90%, 91%, 92%, 93%, 94%, 95%, 95%, 96%, 97%, 98%, 99%, or 100% identical to a polypeptide that begins at any one of amino acids of 60-72 of SEQ ID NO: 577 and ends at any one of amino acids 248-287 of SEQ ID NO: 577. In some embodiments, the hemojuvelin:ActRIIA heteromultimer comprises a hemojuvelin protein, wherein the hemojuvelin protein is a dimer comprising a first polypeptide that is at least 70%, 75%, 80%, 85%, 90%, 91%, 92%, 93%, 94%, 95%, 96%, 97%, 98%, 99%, or 100% identical to a polypeptide that begins at any one of amino acids of 1-6 of SEQ ID NO: 577 and ends at any one of amino acids 54-59 of SEQ ID NO: 577, and second polypeptide that is at least 70%, 75%, 80%, 85%, 90%, 91%, 92%, 93%, 94%, 95%, 96%, 97%, 98%, 99%, or 100% identical to a polypeptide that begins at any one of amino acids of 60-72 of SEQ ID NO: 577 and ends at any one of amino acids 248-287 of SEQ ID NO: 577. In some embodiments, the hemojuvelin:ActRIIA heteromultimer comprises a single chain ligand trap that comprises a first hemojuvelin polypeptide domain that is at least 70%, 75%, 80%, 85%, 90%, 91%, 92%, 93%, 94%, 95%, 96%, 97%, 98%, 99%, or 100% identical to a polypeptide that begins at any one of amino acids of 1-6 of SEQ ID NO: 577 and ends at any one of amino acids 54-59 of SEQ ID NO: 577, and second hemojuvelin polypeptide domain that is at least 70%, 75%, 80%, 85%, 90%, 91%, 92%, 93%, 94%, 95%, 96%, 97%, 98%, 99%, or 100% identical to a polypeptide that begins at any one of amino acids of 60-72 of SEQ ID NO: 577, and ends at any one of amino acids 248-287 of SEQ ID NO: 577. In some embodiments, the hemojuvelin:ActRIIA heteromultimer comprises a polypeptide that is at least 70%, 75%, 80%, 85%, 90%, 91%, 92%, 93%, 94%, 95%, 95%, 96%, 97%, 98%, 99%, or 100% identical to a polypeptide that begins at any one of amino acids of 1-4 of SEQ ID NO: 581 and ends at any one of amino acids 135-200 of SEQ ID NO: 581. In some embodiments, a hemojuvelin:ActRIIA heteromultimer comprises a polypeptide that is at least 70%, 75%, 80%, 85%, 90%, 91%, 92%, 93%, 94%, 95%, 95%, 96%, 97%, 98%, 99%, or 100% identical to the amino acid sequence of any one of SEQ ID NOs: 9, 10, and 11. In some embodiments, a hemojuvelin:ActRIIA heteromultimer comprises a polypeptide that is at least 70%, 75%, 80%, 85%, 90%, 91%, 92%, 93%, 94%, 95%, 95%, 96%, 97%, 98%, 99%, or 100% identical to a polypeptide that begins at any one of amino acids of 21-30 of SEQ ID NO: 9, and ends at any one of amino acids 110-135 of SEQ ID NO: 9. In certain preferred embodiments, hemojuvelin:ActRIIA heteromultimers are soluble. In some embodiments, a hemojuvelin:ActRIIA heteromultimer of the disclosure binds to one or more TGF-beta superfamily ligands (e.g., binds to one or more TGF-beta superfamily ligands with a Kr) of at least 1×10⁻⁷). In some embodiments, a hemojuvelin:ActRIIA heteromultimer of the disclosure inhibits one or more TGF-beta superfamily ligands (e.g., inhibits Smad signaling). Heteromultimer-ligand binding and inhibition may be determined using a variety of assays including, for example, those described herein (e.g., in vitro binding and/or cell-based signaling assays). In some embodiments, a hemojuvelin:ActRIIA heteromultimer of the disclosure has a different TGF-beta ligand binding and/or inhibition profile (specificity) compared to a corresponding homomultimer (e.g., hemojuvelin and ActRIIA homomultimers). In some embodiments, a hemojuvelin:ActRIIA heteromultimer of the disclosure is a heterodimer.

[0147] In certain aspects, the disclosure relates to heteromultimers that comprise at least one hemojuvelin polypeptide, which includes fragments, functional variants, and modified forms thereof, and at least one ActRIIB polypeptide, which includes fragments, functional variants, and modified forms thereof. In some embodiments, the hemojuvelin:ActRIIB heteromultimer comprises a polypeptide that is at least 70%, 75%, 80%, 85%, 90%, 91%, 92%, 93%, 94%, 95%, 95%, 96%, 97%, 98%, 99%, or 100% identical to the amino acid sequence of any one of SEQ ID NOs: 573, 574, 577, 578, 581, or 582. In some embodiments, the hemojuvelin:ActRIIB heteromultimer comprises a polypeptide that is at least 70%, 75%, 80%, 85%, 90%, 91%, 92%, 93%, 94%, 95%, 95%, 96%, 97%, 98%, 99%, or 100% identical to a polypeptide that begins at any one of amino acids of 1-36 of SEQ ID NO: 573 and ends at any one of amino acids 400-426 of SEQ ID NO: 573. In some embodiments, the hemojuvelin:ActRIIB heteromultimer comprises a polypeptide that is at least 70%, 75%, 80%, 85%, 90%, 91%, 92%, 93%, 94%, 95%, 95%, 96%, 97%, 98%, 99%, or 100% identical to a polypeptide that begins at any one of amino acids of 36-42 of SEQ ID NO: 573 and ends at any one of amino acids 167-172 of SEQ ID NO: 573. In some embodiments, the hemojuvelin:ActRIIB heteromultimer comprises a polypeptide that is at least 70%, 75%, 80%, 85%, 90%, 91%, 92%, 93%, 94%, 95%, 95%, 96%, 97%, 98%, 99%, or 100% identical to a polypeptide that begins at any one of amino acids of 173-185 of SEQ ID NO: 573 and ends at any one of amino acids 361-400 of SEQ ID NO: 573. In some embodiments, the hemojuvelin:ActRIIB heteromultimer comprises a hemojuvelin protein that is a dimer comprising a first polypeptide that is at least 70%, 75%, 80%, 85%, 90%, 91%, 92%, 93%, 94%, 95%, 96%, 97%, 98%, 99%, or 100% identical to a polypeptide that begins at any one of amino acids of 36-42 of SEQ ID NO: 573, and ends at any one of amino acids 167-172 of SEQ ID NO: 573 and second polypeptide that is at least 70%, 75%, 80%, 85%, 90%, 91%, 92%, 93%, 94%, 95%, 96%, 97%, 98%, 99%, or 100% identical to a polypeptide that begins at any one of amino acids of 173-185 of SEQ ID NO: 573 and ends at any one of amino acids 361-400 of SEQ ID NO: 573. In some embodiments, the hemojuvelin:ActRIIB heteromultimer comprises a single chain ligand trap that comprises a first hemojuvelin polypeptide domain that is at least 70%, 75%, 80%, 85%, 90%, 91%, 92%, 93%, 94%, 95%, 96%, 97%, 98%, 99%, or 100% identical to a polypeptide that begins at any one of amino acids of 36-42 of SEQ ID NO: 573 and ends at any one of amino acids 167-172 of SEQ ID NO: 573 and second hemojuvelin polypeptide domain that is at least 70%, 75%, 80%, 85%, 90%, 91%, 92%, 93%, 94%, 95%, 96%, 97%, 98%, 99%, or 100% identical to a polypeptide that begins at any one of amino acids of 173-185 of SEQ ID NO: 573 and ends at any one of amino acids 361-400 of SEQ ID NO: 573. In some embodiments, the hemojuvelin:ActRIIB heteromultimer comprises a polypeptide that is at least 70%, 75%, 80%, 85%, 90%, 91%, 92%, 93%, 94%, 95%, 95%, 96%, 97%, 98%, 99%, or 100% identical to a polypeptide that begins at any one of amino acids of 1-6 of SEQ ID NO: 577 and ends at any one of amino acids 287-313 of SEQ ID NO: 577. In some embodiments, the hemojuvelin:ActRIIB heteromultimer comprises a polypeptide that is at least 70%, 75%, 80%, 85%, 90%, 91%, 92%, 93%, 94%, 95%, 95%, 96%, 97%, 98%, 99%, or 100% identical to a polypeptide that begins at any one of amino acids of 1-6 of SEQ ID NO: 577 and ends at any one of amino acids 54-59 of SEQ ID NO: 577. In some embodiments, the hemojuvelin:ActRIIB heteromultimer comprises a polypeptide that is at least 70%, 75%, 80%, 85%, 90%, 91%, 92%, 93%, 94%, 95%, 95%, 96%, 97%, 98%, 99%, or 100% identical to a polypeptide that begins at any one of amino acids of 60-72 of SEQ ID NO: 577 and ends at any one of amino acids 248-287 of SEQ ID NO: 577. In some embodiments, the hemojuvelin:ActRIIB heteromultimer comprises a hemojuvelin protein, wherein the hemojuvelin protein is a dimer comprising a first polypeptide that is at least 70%, 75%, 80%, 85%, 90%, 91%, 92%, 93%, 94%, 95%, 96%, 97%, 98%, 99%, or 100% identical to a polypeptide that begins at any one of amino acids of 1-6 of SEQ ID NO: 577 and ends at any one of amino acids 54-59 of SEQ ID NO: 577, and second polypeptide that is at least 70%, 75%, 80%, 85%, 90%, 91%, 92%, 93%, 94%, 95%, 96%, 97%, 98%, 99%, or 100% identical to a polypeptide that begins at any one of amino acids of 60-72 of SEQ ID NO: 577 and ends at any one of amino acids 248-287 of SEQ ID NO: 577. In some embodiments, the hemojuvelin:ActRIIB heteromultimer comprises a single chain ligand trap that comprises a first hemojuvelin polypeptide domain that is at least 70%, 75%, 80%, 85%, 90%, 91%, 92%, 93%, 94%, 95%, 96%, 97%, 98%, 99%, or 100% identical to a polypeptide that begins at any one of amino acids of 1-6 of SEQ ID NO: 577 and ends at any one of amino acids 54-59 of SEQ ID NO: 577, and second hemojuvelin polypeptide domain that is at least 70%, 75%, 80%, 85%, 90%, 91%, 92%, 93%, 94%, 95%, 96%, 97%, 98%, 99%, or 100% identical to a polypeptide that begins at any one of amino acids of 60-72 of SEQ ID NO: 577, and ends at any one of amino acids 248-287 of SEQ ID NO: 577. In some embodiments, the hemojuvelin:ActRIIB heteromultimer comprises a polypeptide that is at least 70%, 75%, 80%, 85%, 90%, 91%, 92%, 93%, 94%, 95%, 95%, 96%, 97%, 98%, 99%, or 100% identical to a polypeptide that begins at any one of amino acids of 1-4 of SEQ ID NO: 581 and ends at any one of amino acids 135-200 of SEQ ID NO: 581. In some embodiments, a hemojuvelin:ActRIIB heteromultimer comprises a polypeptide that is at least 70%, 75%, 80%, 85%, 90%, 91%, 92%, 93%, 94%, 95%, 95%, 96%, 97%, 98%, 99%, or 100% identical to the amino acid sequence of any one of SEQ ID NOs: 1, 2, 3, 4, 5, and 6. In some embodiments, a hemojuvelin:ActRIIB heteromultimer comprises a polypeptide that is at least 70%, 75%, 80%, 85%, 90%, 91%, 92%, 93%, 94%, 95%, 95%, 96%, 97%, 98%, 99%, or 100% identical to a polypeptide that begins at any one of amino acids 20-29 of SEQ ID NO: 1 and ends at a position corresponding to any one of amino acids 109-134 of SEQ ID NO: 1. In some embodiments, a hemojuvelin:ActRIIB heteromultimer comprises an ActRIIB polypeptide wherein the amino acid position corresponding to L79 of SEQ ID NO: 1 is not an acidic amino acid. In certain preferred embodiments, hemojuvelin:ActRIIB heteromultimers are soluble. In some embodiments, a hemojuvelin:ActRIIB heteromultimer of the disclosure binds to one or more TGF-beta superfamily ligands (e.g., binds to one or more TGF-beta superfamily ligands with a K_{D} of at least 1×10⁻⁷). In some embodiments, a hemojuvelin:ActRIIB heteromultimer of the disclosure inhibits one or more TGF-beta superfamily ligands (e.g., inhibits Smad signaling). Heteromultimer-ligand binding and inhibition may be determined using a variety of assays including, for example, those described herein (e.g., in vitro binding and/or cell-based signaling assays). In some embodiments, a hemojuvelin:ActRIIB heteromultimer of the disclosure has a different TGF-beta ligand binding and/or inhibition profile (specificity) compared to a corresponding homomultimer (e.g., hemojuvelin and ActRIIB homomultimers). In some embodiments, a hemojuvelin:ActRIIB heteromultimer of the disclosure is a heterodimer.

[0148] In certain aspects, the disclosure relates to heteromultimers that comprise at least one hemojuvelin polypeptide, which includes fragments, functional variants, and modified forms thereof, and at least one TGFBRII polypeptide, which includes fragments, functional variants, and modified forms thereof. In some embodiments, the hemojuvelin:TGFBRII heteromultimer comprises a polypeptide that is at least 70%, 75%, 80%, 85%, 90%, 91%, 92%, 93%, 94%, 95%, 95%, 96%, 97%, 98%, 99%, or 100% identical to the amino acid sequence of any one of SEQ ID NOs: 573, 574, 577, 578, 581, or 582. In some embodiments, the hemojuvelin:TGFBRII heteromultimer comprises a polypeptide that is at least 70%, 75%, 80%, 85%, 90%, 91%, 92%, 93%, 94%, 95%, 95%, 96%, 97%, 98%, 99%, or 100% identical to a polypeptide that begins at any one of amino acids of 1-36 of SEQ ID NO: 573 and ends at any one of amino acids 400-426 of SEQ ID NO: 573. In some embodiments, the hemojuvelin:TGFBRII heteromultimer comprises a polypeptide that is at least 70%, 75%, 80%, 85%, 90%, 91%, 92%, 93%, 94%, 95%, 95%, 96%, 97%, 98%, 99%, or 100% identical to a polypeptide that begins at any one of amino acids of 36-42 of SEQ ID NO: 573 and ends at any one of amino acids 167-172 of SEQ ID NO: 573. In some embodiments, the hemojuvelin:TGFBRII heteromultimer comprises a polypeptide that is at least 70%, 75%, 80%, 85%, 90%, 91%, 92%, 93%, 94%, 95%, 95%, 96%, 97%, 98%, 99%, or 100% identical to a polypeptide that begins at any one of amino acids of 173-185 of SEQ ID NO: 573 and ends at any one of amino acids 361-400 of SEQ ID NO: 573. In some embodiments, the hemojuvelin:TGFBRII heteromultimer comprises a hemojuvelin protein that is a dimer comprising a first polypeptide that is at least 70%, 75%, 80%, 85%, 90%, 91%, 92%, 93%, 94%, 95%, 96%, 97%, 98%, 99%, or 100% identical to a polypeptide that begins at any one of amino acids of 36-42 of SEQ ID NO: 573, and ends at any one of amino acids 167-172 of SEQ ID NO: 573 and second polypeptide that is at least 70%, 75%, 80%, 85%, 90%, 91%, 92%, 93%, 94%, 95%, 96%, 97%, 98%, 99%, or 100% identical to a polypeptide that begins at any one of amino acids of 173-185 of SEQ ID NO: 573 and ends at any one of amino acids 361-400 of SEQ ID NO: 573. In some embodiments, the hemojuvelin:TGFBRII heteromultimer comprises a single chain ligand trap that comprises a first hemojuvelin polypeptide domain that is at least 70%, 75%, 80%, 85%, 90%, 91%, 92%, 93%, 94%, 95%, 96%, 97%, 98%, 99%, or 100% identical to a polypeptide that begins at any one of amino acids of 36-42 of SEQ ID NO: 573 and ends at any one of amino acids 167-172 of SEQ ID NO: 573 and second hemojuvelin polypeptide domain that is at least 70%, 75%, 80%, 85%, 90%, 91%, 92%, 93%, 94%, 95%, 96%, 97%, 98%, 99%, or 100% identical to a polypeptide that begins at any one of amino acids of 173-185 of SEQ ID NO: 573 and ends at any one of amino acids 361-400 of SEQ ID NO: 573. In some embodiments, the hemojuvelin:TGFBRII heteromultimer comprises a polypeptide that is at least 70%, 75%, 80%, 85%, 90%, 91%, 92%, 93%, 94%, 95%, 95%, 96%, 97%, 98%, 99%, or 100% identical to a polypeptide that begins at any one of amino acids of 1-6 of SEQ ID NO: 577 and ends at any one of amino acids 287-313 of SEQ ID NO: 577. In some embodiments, the hemojuvelin:TGFBRII heteromultimer comprises a polypeptide that is at least 70%, 75%, 80%, 85%, 90%, 91%, 92%, 93%, 94%, 95%, 95%, 96%, 97%, 98%, 99%, or 100% identical to a polypeptide that begins at any one of amino acids of 1-6 of SEQ ID NO: 577 and ends at any one of amino acids 54-59 of SEQ ID NO: 577. In some embodiments, the hemojuvelin:TGFBRII heteromultimer comprises a polypeptide that is at least 70%, 75%, 80%, 85%, 90%, 91%, 92%, 93%, 94%, 95%, 95%, 96%, 97%, 98%, 99%, or 100% identical to a polypeptide that begins at any one of amino acids of 60-72 of SEQ ID NO: 577 and ends at any one of amino acids 248-287 of SEQ ID NO: 577. In some embodiments, the hemojuvelin:TGFBRII heteromultimer comprises a hemojuvelin protein, wherein the hemojuvelin protein is a dimer comprising a first polypeptide that is at least 70%, 75%, 80%, 85%, 90%, 91%, 92%, 93%, 94%, 95%, 96%, 97%, 98%, 99%, or 100% identical to a polypeptide that begins at any one of amino acids of 1-6 of SEQ ID NO: 577 and ends at any one of amino acids 54-59 of SEQ ID NO: 577, and second polypeptide that is at least 70%, 75%, 80%, 85%, 90%, 91%, 92%, 93%, 94%, 95%, 96%, 97%, 98%, 99%, or 100% identical to a polypeptide that begins at any one of amino acids of 60-72 of SEQ ID NO: 577 and ends at any one of amino acids 248-287 of SEQ ID NO: 577. In some embodiments, the hemojuvelin:TGFBRII heteromultimer comprises a single chain ligand trap that comprises a first hemojuvelin polypeptide domain that is at least 70%, 75%, 80%, 85%, 90%, 91%, 92%, 93%, 94%, 95%, 96%, 97%, 98%, 99%, or 100% identical to a polypeptide that begins at any one of amino acids of 1-6 of SEQ ID NO: 577 and ends at any one of amino acids 54-59 of SEQ ID NO: 577, and second hemojuvelin polypeptide domain that is at least 70%, 75%, 80%, 85%, 90%, 91%, 92%, 93%, 94%, 95%, 96%, 97%, 98%, 99%, or 100% identical to a polypeptide that begins at any one of amino acids of 60-72 of SEQ ID NO: 577, and ends at any one of amino acids 248-287 of SEQ ID NO: 577. In some embodiments, the hemojuvelin:TGFBRII heteromultimer comprises a polypeptide that is at least 70%, 75%, 80%, 85%, 90%, 91%, 92%, 93%, 94%, 95%, 95%, 96%, 97%, 98%, 99%, or 100% identical to a polypeptide that begins at any one of amino acids of 1-4 of SEQ ID NO: 581 and ends at any one of amino acids 135-200 of SEQ ID NO: 581. In some embodiments, a hemojuvelin:TGFBRII heteromultimer comprises a polypeptide that is at least 70%, 75%, 80%, 85%, 90%, 91%, 92%, 93%, 94%, 95%, 95%, 96%, 97%, 98%, 99%, or 100% identical to the amino acid sequence of any one of SEQ ID NOs: 42, 43, 67, or 68. In some embodiments, a hemojuvelin:TGFBRII heteromultimer comprises a polypeptide that is at least 70%, 75%, 80%, 85%, 90%, 91%, 92%, 93%, 94%, 95%, 95%, 96%, 97%, 98%, 99%, or 100% identical to a polypeptide that begins at any one of amino acids of 23-51 of SEQ ID NO: 42 and ends at any one of amino acids 143-166 of SEQ ID NO: 42. In some embodiments, a hemojuvelin:TGFBRII heteromultimer comprises a polypeptide that is at least 70%, 75%, 80%, 85%, 90%, 91%, 92%, 93%, 94%, 95%, 95%, 96%, 97%, 98%, 99%, or 100% identical to a polypeptide that begins at any one of amino acids of 23-44 of SEQ ID NO: 67 and ends at any one of amino acids 168-191 of SEQ ID NO: 67. In certain preferred embodiments, hemojuvelin:TGFBRII heteromultimers are soluble. In some embodiments, a hemojuvelin:TGFBRII heteromultimer of the disclosure binds to one or more TGF-beta superfamily ligands (e.g., binds to one or more TGF-beta superfamily ligands with a K_{D} of at least 1×10⁻⁷). In some embodiments, a hemojuvelin:TGFBRII heteromultimer of the disclosure inhibits one or more TGF-beta superfamily ligands (e.g., inhibits Smad signaling). Heteromultimer-ligand binding and inhibition may be determined using a variety of assays including, for example, those described herein (e.g., in vitro binding and/or cell-based signaling assays). In some embodiments, a hemojuvelin:TGFBRII heteromultimer of the disclosure has a different TGF-beta ligand binding and/or inhibition profile (specificity) compared to a corresponding homomultimer (e.g., hemojuvelin and TGFBRII homomultimers). In some embodiments, a hemojuvelin:TGFBRII heteromultimer of the disclosure is a heterodimer.

[0149] In certain aspects, the disclosure relates to heteromultimers that comprise at least one hemojuvelin polypeptide, which includes fragments, functional variants, and modified forms thereof, and at least one BMPRII polypeptide, which includes fragments, functional variants, and modified forms thereof. In some embodiments, the hemojuvelin:BMPRII heteromultimer comprises a polypeptide that is at least 70%, 75%, 80%, 85%, 90%, 91%, 92%, 93%, 94%, 95%, 95%, 96%, 97%, 98%, 99%, or 100% identical to the amino acid sequence of any one of SEQ ID NOs: 573, 574, 577, 578, 581, or 582. In some embodiments, the hemojuvelin:BMPRII heteromultimer comprises a polypeptide that is at least 70%, 75%, 80%, 85%, 90%, 91%, 92%, 93%, 94%, 95%, 95%, 96%, 97%, 98%, 99%, or 100% identical to a polypeptide that begins at any one of amino acids of 1-36 of SEQ ID NO: 573 and ends at any one of amino acids 400-426 of SEQ ID NO: 573. In some embodiments, the hemojuvelin:BMPRII heteromultimer comprises a polypeptide that is at least 70%, 75%, 80%, 85%, 90%, 91%, 92%, 93%, 94%, 95%, 95%, 96%, 97%, 98%, 99%, or 100% identical to a polypeptide that begins at any one of amino acids of 36-42 of SEQ ID NO: 573 and ends at any one of amino acids 167-172 of SEQ ID NO: 573. In some embodiments, the hemojuvelin:BMPRII heteromultimer comprises a polypeptide that is at least 70%, 75%, 80%, 85%, 90%, 91%, 92%, 93%, 94%, 95%, 95%, 96%, 97%, 98%, 99%, or 100% identical to a polypeptide that begins at any one of amino acids of 173-185 of SEQ ID NO: 573 and ends at any one of amino acids 361-400 of SEQ ID NO: 573. In some embodiments, the hemojuvelin:BMPRII heteromultimer comprises a hemojuvelin protein that is a dimer comprising a first polypeptide that is at least 70%, 75%, 80%, 85%, 90%, 91%, 92%, 93%, 94%, 95%, 96%, 97%, 98%, 99%, or 100% identical to a polypeptide that begins at any one of amino acids of 36-42 of SEQ ID NO: 573, and ends at any one of amino acids 167-172 of SEQ ID NO: 573 and second polypeptide that is at least 70%, 75%, 80%, 85%, 90%, 91%, 92%, 93%, 94%, 95%, 96%, 97%, 98%, 99%, or 100% identical to a polypeptide that begins at any one of amino acids of 173-185 of SEQ ID NO: 573 and ends at any one of amino acids 361-400 of SEQ ID NO: 573. In some embodiments, the hemojuvelin:BMPRII heteromultimer comprises a single chain ligand trap that comprises a first hemojuvelin polypeptide domain that is at least 70%, 75%, 80%, 85%, 90%, 91%, 92%, 93%, 94%, 95%, 96%, 97%, 98%, 99%, or 100% identical to a polypeptide that begins at any one of amino acids of 36-42 of SEQ ID NO: 573 and ends at any one of amino acids 167-172 of SEQ ID NO: 573 and second hemojuvelin polypeptide domain that is at least 70%, 75%, 80%, 85%, 90%, 91%, 92%, 93%, 94%, 95%, 96%, 97%, 98%, 99%, or 100% identical to a polypeptide that begins at any one of amino acids of 173-185 of SEQ ID NO: 573 and ends at any one of amino acids 361-400 of SEQ ID NO: 573. In some embodiments, the hemojuvelin:BMPRII heteromultimer comprises a polypeptide that is at least 70%, 75%, 80%, 85%, 90%, 91%, 92%, 93%, 94%, 95%, 95%, 96%, 97%, 98%, 99%, or 100% identical to a polypeptide that begins at any one of amino acids of 1-6 of SEQ ID NO: 577 and ends at any one of amino acids 287-313 of SEQ ID NO: 577. In some embodiments, the hemojuvelin:BMPRII heteromultimer comprises a polypeptide that is at least 70%, 75%, 80%, 85%, 90%, 91%, 92%, 93%, 94%, 95%, 95%, 96%, 97%, 98%, 99%, or 100% identical to a polypeptide that begins at any one of amino acids of 1-6 of SEQ ID NO: 577 and ends at any one of amino acids 54-59 of SEQ ID NO: 577. In some embodiments, the hemojuvelin:BMPRII heteromultimer comprises a polypeptide that is at least 70%, 75%, 80%, 85%, 90%, 91%, 92%, 93%, 94%, 95%, 95%, 96%, 97%, 98%, 99%, or 100% identical to a polypeptide that begins at any one of amino acids of 60-72 of SEQ ID NO: 577 and ends at any one of amino acids 248-287 of SEQ ID NO: 577. In some embodiments, the hemojuvelin:BMPRII heteromultimer comprises a hemojuvelin protein, wherein the hemojuvelin protein is a dimer comprising a first polypeptide that is at least 70%, 75%, 80%, 85%, 90%, 91%, 92%, 93%, 94%, 95%, 96%, 97%, 98%, 99%, or 100% identical to a polypeptide that begins at any one of amino acids of 1-6 of SEQ ID NO: 577 and ends at any one of amino acids 54-59 of SEQ ID NO: 577, and second polypeptide that is at least 70%, 75%, 80%, 85%, 90%, 91%, 92%, 93%, 94%, 95%, 96%, 97%, 98%, 99%, or 100% identical to a polypeptide that begins at any one of amino acids of 60-72 of SEQ ID NO: 577 and ends at any one of amino acids 248-287 of SEQ ID NO: 577. In some embodiments, the hemojuvelin:BMPRII heteromultimer comprises a single chain ligand trap that comprises a first hemojuvelin polypeptide domain that is at least 70%, 75%, 80%, 85%, 90%, 91%, 92%, 93%, 94%, 95%, 96%, 97%, 98%, 99%, or 100% identical to a polypeptide that begins at any one of amino acids of 1-6 of SEQ ID NO: 577 and ends at any one of amino acids 54-59 of SEQ ID NO: 577, and second hemojuvelin polypeptide domain that is at least 70%, 75%, 80%, 85%, 90%, 91%, 92%, 93%, 94%, 95%, 96%, 97%, 98%, 99%, or 100% identical to a polypeptide that begins at any one of amino acids of 60-72 of SEQ ID NO: 577, and ends at any one of amino acids 248-287 of SEQ ID NO: 577. In some embodiments, the hemojuvelin:BMPRII heteromultimer comprises a polypeptide that is at least 70%, 75%, 80%, 85%, 90%, 91%, 92%, 93%, 94%, 95%, 95%, 96%, 97%, 98%, 99%, or 100% identical to a polypeptide that begins at any one of amino acids of 1-4 of SEQ ID NO: 581 and ends at any one of amino acids 135-200 of SEQ ID NO: 581. In some embodiments, a hemojuvelin:BMPRII heteromultimer comprises a polypeptide that is at least 70%, 75%, 80%, 85%, 90%, 91%, 92%, 93%, 94%, 95%, 95%, 96%, 97%, 98%, 99%, or 100% identical to the amino acid sequence of any one of SEQ ID NOs: 46, 47, 71, or 72. In some embodiments, a hemojuvelin:BMPRII heteromultimer comprises a polypeptide that is at least 70%, 75%, 80%, 85%, 90%, 91%, 92%, 93%, 94%, 95%, 95%, 96%, 97%, 98%, 99%, or 100% identical to a polypeptide that begins at any one of amino acids of 27-34 of SEQ ID NO: 46 and ends at any one of amino acids 123-150 of SEQ ID NO: 46. In some embodiments, a hemojuvelin:BMPRII heteromultimer comprises a polypeptide that is at least 70%, 75%, 80%, 85%, 90%, 91%, 92%, 93%, 94%, 95%, 95%, 96%, 97%, 98%, 99%, or 100% identical to a polypeptide that begins at any one of amino acids of 27-34 of SEQ ID NO: 71 and ends at any one of amino acids 123-150 of SEQ ID NO: 71. In certain preferred embodiments, hemojuvelin:BMPRII heteromultimers are soluble. In some embodiments, a hemojuvelin:BMPRII heteromultimer of the disclosure binds to one or more TGF-beta superfamily ligands (e.g., binds to one or more TGF-beta superfamily ligands with a K_{D} of at least 1×10⁻⁷). In some embodiments, a hemojuvelin:BMPRII heteromultimer of the disclosure inhibits one or more TGF-beta superfamily ligands (e.g., inhibits Smad signaling). Heteromultimer-ligand binding and inhibition may be determined using a variety of assays including, for example, those described herein (e.g., in vitro binding and/or cell-based signaling assays). In some embodiments, a hemojuvelin:BMPRII heteromultimer of the disclosure has a different TGF-beta ligand binding and/or inhibition profile (specificity) compared to a corresponding homomultimer (e.g., hemojuvelin and BMPRII homomultimers). In some embodiments, a hemojuvelin:BMPRII heteromultimer of the disclosure is a heterodimer.

[0150] In certain aspects, the disclosure relates to heteromultimers that comprise at least one hemojuvelin polypeptide, which includes fragments, functional variants, and modified forms thereof, and at least one MISRII polypeptide, which includes fragments, functional variants, and modified forms thereof. In some embodiments, the hemojuvelin:MISRII heteromultimer comprises a polypeptide that is at least 70%, 75%, 80%, 85%, 90%, 91%, 92%, 93%, 94%, 95%, 95%, 96%, 97%, 98%, 99%, or 100% identical to the amino acid sequence of any one of SEQ ID NOs: 573, 574, 577, 578, 581, or 582. In some embodiments, the hemojuvelin:MISRII heteromultimer comprises a polypeptide that is at least 70%, 75%, 80%, 85%, 90%, 91%, 92%, 93%, 94%, 95%, 95%, 96%, 97%, 98%, 99%, or 100% identical to a polypeptide that begins at any one of amino acids of 1-36 of SEQ ID NO: 573 and ends at any one of amino acids 400-426 of SEQ ID NO: 573. In some embodiments, the hemojuvelin:MISRII heteromultimer comprises a polypeptide that is at least 70%, 75%, 80%, 85%, 90%, 91%, 92%, 93%, 94%, 95%, 95%, 96%, 97%, 98%, 99%, or 100% identical to a polypeptide that begins at any one of amino acids of 36-42 of SEQ ID NO: 573 and ends at any one of amino acids 167-172 of SEQ ID NO: 573. In some embodiments, the hemojuvelin:MISRII heteromultimer comprises a polypeptide that is at least 70%, 75%, 80%, 85%, 90%, 91%, 92%, 93%, 94%, 95%, 95%, 96%, 97%, 98%, 99%, or 100% identical to a polypeptide that begins at any one of amino acids of 173-185 of SEQ ID NO: 573 and ends at any one of amino acids 361-400 of SEQ ID NO: 573. In some embodiments, the hemojuvelin:MISRII heteromultimer comprises a hemojuvelin protein that is a dimer comprising a first polypeptide that is at least 70%, 75%, 80%, 85%, 90%, 91%, 92%, 93%, 94%, 95%, 96%, 97%, 98%, 99%, or 100% identical to a polypeptide that begins at any one of amino acids of 36-42 of SEQ ID NO: 573, and ends at any one of amino acids 167-172 of SEQ ID NO: 573 and second polypeptide that is at least 70%, 75%, 80%, 85%, 90%, 91%, 92%, 93%, 94%, 95%, 96%, 97%, 98%, 99%, or 100% identical to a polypeptide that begins at any one of amino acids of 173-185 of SEQ ID NO: 573 and ends at any one of amino acids 361-400 of SEQ ID NO: 573. In some embodiments, the hemojuvelin:MISRII heteromultimer comprises a single chain ligand trap that comprises a first hemojuvelin polypeptide domain that is at least 70%, 75%, 80%, 85%, 90%, 91%, 92%, 93%, 94%, 95%, 96%, 97%, 98%, 99%, or 100% identical to a polypeptide that begins at any one of amino acids of 36-42 of SEQ ID NO: 573 and ends at any one of amino acids 167-172 of SEQ ID NO: 573 and second hemojuvelin polypeptide domain that is at least 70%, 75%, 80%, 85%, 90%, 91%, 92%, 93%, 94%, 95%, 96%, 97%, 98%, 99%, or 100% identical to a polypeptide that begins at any one of amino acids of 173-185 of SEQ ID NO: 573 and ends at any one of amino acids 361-400 of SEQ ID NO: 573. In some embodiments, the hemojuvelin:MISRII heteromultimer comprises a polypeptide that is at least 70%, 75%, 80%, 85%, 90%, 91%, 92%, 93%, 94%, 95%, 95%, 96%, 97%, 98%, 99%, or 100% identical to a polypeptide that begins at any one of amino acids of 1-6 of SEQ ID NO: 577 and ends at any one of amino acids 287-313 of SEQ ID NO: 577. In some embodiments, the hemojuvelin:MISRII heteromultimer comprises a polypeptide that is at least 70%, 75%, 80%, 85%, 90%, 91%, 92%, 93%, 94%, 95%, 95%, 96%, 97%, 98%, 99%, or 100% identical to a polypeptide that begins at any one of amino acids of 1-6 of SEQ ID NO: 577 and ends at any one of amino acids 54-59 of SEQ ID NO: 577. In some embodiments, the hemojuvelin:MISRII heteromultimer comprises a polypeptide that is at least 70%, 75%, 80%, 85%, 90%, 91%, 92%, 93%, 94%, 95%, 95%, 96%, 97%, 98%, 99%, or 100% identical to a polypeptide that begins at any one of amino acids of 60-72 of SEQ ID NO: 577 and ends at any one of amino acids 248-287 of SEQ ID NO: 577. In some embodiments, the hemojuvelin:MISRII heteromultimer comprises a hemojuvelin protein, wherein the hemojuvelin protein is a dimer comprising a first polypeptide that is at least 70%, 75%, 80%, 85%, 90%, 91%, 92%, 93%, 94%, 95%, 96%, 97%, 98%, 99%, or 100% identical to a polypeptide that begins at any one of amino acids of 1-6 of SEQ ID NO: 577 and ends at any one of amino acids 54-59 of SEQ ID NO: 577, and second polypeptide that is at least 70%, 75%, 80%, 85%, 90%, 91%, 92%, 93%, 94%, 95%, 96%, 97%, 98%, 99%, or 100% identical to a polypeptide that begins at any one of amino acids of 60-72 of SEQ ID NO: 577 and ends at any one of amino acids 248-287 of SEQ ID NO: 577. In some embodiments, the hemojuvelin:MISRII heteromultimer comprises a single chain ligand trap that comprises a first hemojuvelin polypeptide domain that is at least 70%, 75%, 80%, 85%, 90%, 91%, 92%, 93%, 94%, 95%, 96%, 97%, 98%, 99%, or 100% identical to a polypeptide that begins at any one of amino acids of 1-6 of SEQ ID NO: 577 and ends at any one of amino acids 54-59 of SEQ ID NO: 577, and second hemojuvelin polypeptide domain that is at least 70%, 75%, 80%, 85%, 90%, 91%, 92%, 93%, 94%, 95%, 96%, 97%, 98%, 99%, or 100% identical to a polypeptide that begins at any one of amino acids of 60-72 of SEQ ID NO: 577, and ends at any one of amino acids 248-287 of SEQ ID NO: 577. In some embodiments, the hemojuvelin:MISRII heteromultimer comprises a polypeptide that is at least 70%, 75%, 80%, 85%, 90%, 91%, 92%, 93%, 94%, 95%, 95%, 96%, 97%, 98%, 99%, or 100% identical to a polypeptide that begins at any one of amino acids of 1-4 of SEQ ID NO: 581 and ends at any one of amino acids 135-200 of SEQ ID NO: 581. In some embodiments, a hemojuvelin:MISRII heteromultimer comprises a polypeptide that is at least 70%, 75%, 80%, 85%, 90%, 91%, 92%, 93%, 94%, 95%, 95%, 96%, 97%, 98%, 99%, or 100% identical to the amino acid sequence of any one of SEQ ID NOs: 50, 51, 75, 76, 79, or 80. In some embodiments, a hemojuvelin:MISRII heteromultimer comprises a polypeptide that is at least 70%, 75%, 80%, 85%, 90%, 91%, 92%, 93%, 94%, 95%, 95%, 96%, 97%, 98%, 99%, or 100% identical to a polypeptide that begins at any one of amino acids of 17-24 of SEQ ID NO: 50 and ends at any one of amino acids 116-149 of SEQ ID NO: 50. In some embodiments, a hemojuvelin:MISRII heteromultimer comprises a polypeptide that is at least 70%, 75%, 80%, 85%, 90%, 91%, 92%, 93%, 94%, 95%, 95%, 96%, 97%, 98%, 99%, or 100% identical to a polypeptide that begins at any one of amino acids of 17-24 of SEQ ID NO: 75 and ends at any one of amino acids 116-149 of SEQ ID NO: 75. In some embodiments, a hemojuvelin:MISRII heteromultimer comprises a polypeptide that is at least 70%, 75%, 80%, 85%, 90%, 91%, 92%, 93%, 94%, 95%, 95%, 96%, 97%, 98%, 99%, or 100% identical to a polypeptide that begins at any one of amino acids of 17-24 of SEQ ID NO: 50 and ends at any one of amino acids 116-149 of SEQ ID NO: 79. In certain preferred embodiments, hemojuvelin:MISRII heteromultimers are soluble. In some embodiments, a hemojuvelin:MISRII heteromultimer of the disclosure binds to one or more TGF-beta superfamily ligands (e.g., binds to one or more TGF-beta superfamily ligands with a K_{D} of at least 1×10⁻⁷). In some embodiments, a hemojuvelin:MISRII heteromultimer of the disclosure inhibits one or more TGF-beta superfamily ligands (e.g., inhibits Smad signaling). Heteromultimer-ligand binding and inhibition may be determined using a variety of assays including, for example, those described herein (e.g., in vitro binding and/or cell-based signaling assays). In some embodiments, a hemojuvelin:MISRII heteromultimer of the disclosure has a different TGF-beta ligand binding and/or inhibition profile (specificity) compared to a corresponding homomultimer (e.g., hemojuvelin and MISRII homomultimers). In some embodiments, a hemojuvelin:MISRII heteromultimer of the disclosure is a heterodimer.

[0151] In certain aspects, the disclosure relates to heteromultimers that comprise at least one endoglin polypeptide, which includes fragments, functional variants, and modified forms thereof, and at least one betaglycan polypeptide, which includes fragments, functional variants, and modified forms thereof. In some embodiments, the endoglin:betaglycan heteromultimer comprises a polypeptide that is at least 70%, 75%, 80%, 85%, 90%, 91%, 92%, 93%, 94%, 95%, 95%, 96%, 97%, 98%, 99%, or 100% identical to the amino acid sequence of any one of SEQ ID NOs: 501, 502, 505, 506, 509, 510, 593, or 594. In some embodiments, the endoglin:betaglycan heteromultimer comprises a polypeptide that is at least 70%, 75%, 80%, 85%, 90%, 91%, 92%, 93%, 94%, 95%, 95%, 96%, 97%, 98%, 99%, or 100% identical to a polypeptide that begins at any one of amino acids of 26-30 of SEQ ID NO: 501 and ends at any one of amino acids 330-346 of SEQ ID NO: 501. In some embodiments, the endoglin:betaglycan heteromultimer comprises a polypeptide that is at least 70%, 75%, 80%, 85%, 90%, 91%, 92%, 93%, 94%, 95%, 95%, 96%, 97%, 98%, 99%, or 100% identical to a polypeptide that begins at any one of amino acids of 26-30 of SEQ ID NO: 505 and ends at any one of amino acids 330-346 of SEQ ID NO: 505. In some embodiments, the endoglin:betaglycan heteromultimer comprises a polypeptide that is at least 70%, 75%, 80%, 85%, 90%, 91%, 92%, 93%, 94%, 95%, 95%, 96%, 97%, 98%, 99%, or 100% identical to a polypeptide that begins at any one of amino acids of 1-25 of SEQ ID NO: 509, and ends at any one of amino acids 148-164 of SEQ ID NO: 509. In some embodiments, the endoglin:betaglycan heteromultimer comprises a polypeptide that is at least 70%, 75%, 80%, 85%, 90%, 91%, 92%, 93%, 94%, 95%, 95%, 96%, 97%, 98%, 99%, or 100% identical to the amino acid sequence of any one of SEQ ID NOs: 585, 586, 589, or 590. In some embodiments, the endoglin:betaglycan heteromultimer comprises a polypeptide that is at least 70%, 75%, 80%, 85%, 90%, 91%, 92%, 93%, 94%, 95%, 95%, 96%, 97%, 98%, 99%, or 100% identical to a polypeptide that begins at any one of amino acids of 21-28 of SEQ ID NO: 585 and ends at any one of amino acids 381-787 of SEQ ID NO: 585. In some embodiments, the endoglin:betaglycan heteromultimer comprises a polypeptide that is at least 70%, 75%, 80%, 85%, 90%, 91%, 92%, 93%, 94%, 95%, 95%, 96%, 97%, 98%, 99%, or 100% identical to a polypeptide that begins at any one of amino acids of 21-28 of SEQ ID NO: 589 and ends at any one of amino acids 380-786 of SEQ ID NO: 589. In certain preferred embodiments, endoglin:betaglycan heteromultimers are soluble. In some embodiments, a endoglin:betaglycan heteromultimer of the disclosure binds to one or more TGF-beta superfamily ligands (e.g., binds to one or more TGF-beta superfamily ligands with a K_{D} of at least 1×10⁻⁷). In some embodiments, a endoglin:betaglycan heteromultimer of the disclosure inhibits one or more TGF-beta superfamily ligands (e.g., inhibits Smad signaling). Heteromultimer-ligand binding and inhibition may be determined using a variety of assays including, for example, those described herein (e.g., in vitro binding and/or cell-based signaling assays). In some embodiments, a endoglin:betaglycan heteromultimer of the disclosure has a different TGF-beta ligand binding and/or inhibition profile (specificity) compared to a corresponding homomultimer (e.g., endoglin and betaglycan homomultimers). In some embodiments, a endoglin:betaglycan heteromultimer of the disclosure is a heterodimer.

[0152] In certain aspects, the disclosure relates to heteromultimers that comprise at least one endoglin polypeptide, which includes fragments, functional variants, and modified forms thereof, and at least one Cripto-1 polypeptide, which includes fragments, functional variants, and modified forms thereof. In some embodiments, the endoglin:Cripto-1 heteromultimer comprises a polypeptide that is at least 70%, 75%, 80%, 85%, 90%, 91%, 92%, 93%, 94%, 95%, 95%, 96%, 97%, 98%, 99%, or 100% identical to the amino acid sequence of any one of SEQ ID NOs: 501, 502, 505, 506, 509, 510, 593, or 594. In some embodiments, the endoglin:Cripto-1 heteromultimer comprises a polypeptide that is at least 70%, 75%, 80%, 85%, 90%, 91%, 92%, 93%, 94%, 95%, 95%, 96%, 97%, 98%, 99%, or 100% identical to a polypeptide that begins at any one of amino acids of 26-30 of SEQ ID NO: 501 and ends at any one of amino acids 330-346 of SEQ ID NO: 501. In some embodiments, the endoglin:Cripto-1 heteromultimer comprises a polypeptide that is at least 70%, 75%, 80%, 85%, 90%, 91%, 92%, 93%, 94%, 95%, 95%, 96%, 97%, 98%, 99%, or 100% identical to a polypeptide that begins at any one of amino acids of 26-30 of SEQ ID NO: 505 and ends at any one of amino acids 330-346 of SEQ ID NO: 505. In some embodiments, the endoglin:Cripto-1 heteromultimer comprises a polypeptide that is at least 70%, 75%, 80%, 85%, 90%, 91%, 92%, 93%, 94%, 95%, 95%, 96%, 97%, 98%, 99%, or 100% identical to a polypeptide that begins at any one of amino acids of 1-25 of SEQ ID NO: 509, and ends at any one of amino acids 148-164 of SEQ ID NO: 509. In some embodiments, the endoglin:Cripto-1 heteromultimer comprises a polypeptide that is at least 70%, 75%, 80%, 85%, 90%, 91%, 92%, 93%, 94%, 95%, 95%, 96%, 97%, 98%, 99%, or 100% identical to the amino acid sequence of any one of SEQ ID NOs: 513, 514, 517, or 518. In some embodiments, the endoglin:Cripto-1 heteromultimer comprises a polypeptide that is at least 70%, 75%, 80%, 85%, 90%, 91%, 92%, 93%, 94%, 95%, 95%, 96%, 97%, 98%, 99%, or 100% identical to a polypeptide that begins at any one of amino acids of 31-82 of SEQ ID NO: 513 and ends at any one of amino acids 172-188 of SEQ ID NO: 513. In some embodiments, the endoglin:Cripto-1 heteromultimer comprises a polypeptide that is at least 70%, 75%, 80%, 85%, 90%, 91%, 92%, 93%, 94%, 95%, 95%, 96%, 97%, 98%, 99%, or 100% identical to a polypeptide that begins at any one of amino acids of 15-66 of SEQ ID NO: 517, and ends at any one of amino acids 156-172 of SEQ ID NO: 517. In certain preferred embodiments, endoglin:Cripto-1 heteromultimers are soluble. In some embodiments, a endoglin:Cripto-1 heteromultimer of the disclosure binds to one or more TGF-beta superfamily ligands (e.g., binds to one or more TGF-beta superfamily ligands with a K_{D} of at least 1×10⁻⁷). In some embodiments, a endoglin:Cripto-1 heteromultimer of the disclosure inhibits one or more TGF-beta superfamily ligands (e.g., inhibits Smad signaling). Heteromultimer-ligand binding and inhibition may be determined using a variety of assays including, for example, those described herein (e.g., in vitro binding and/or cell-based signaling assays). In some embodiments, a endoglin:Cripto-1 heteromultimer of the disclosure has a different TGF-beta ligand binding and/or inhibition profile (specificity) compared to a corresponding homomultimer (e.g., endoglin and Cripto-1 homomultimers). In some embodiments, a endoglin:Cripto-1 heteromultimer of the disclosure is a heterodimer.

[0153] In certain aspects, the disclosure relates to heteromultimers that comprise at least one endoglin polypeptide, which includes fragments, functional variants, and modified forms thereof, and at least one Cryptic protein polypeptide, which includes fragments, functional variants, and modified forms thereof. In some embodiments, the endoglin:Cryptic protein heteromultimer comprises a polypeptide that is at least 70%, 75%, 80%, 85%, 90%, 91%, 92%, 93%, 94%, 95%, 95%, 96%, 97%, 98%, 99%, or 100% identical to the amino acid sequence of any one of SEQ ID NOs: 501, 502, 505, 506, 509, 510, 593, or 594. In some embodiments, the endoglin:Cryptic protein heteromultimer comprises a polypeptide that is at least 70%, 75%, 80%, 85%, 90%, 91%, 92%, 93%, 94%, 95%, 95%, 96%, 97%, 98%, 99%, or 100% identical to a polypeptide that begins at any one of amino acids of 26-30 of SEQ ID NO: 501 and ends at any one of amino acids 330-346 of SEQ ID NO: 501. In some embodiments, the endoglin:Cryptic protein heteromultimer comprises a polypeptide that is at least 70%, 75%, 80%, 85%, 90%, 91%, 92%, 93%, 94%, 95%, 95%, 96%, 97%, 98%, 99%, or 100% identical to a polypeptide that begins at any one of amino acids of 26-30 of SEQ ID NO: 505 and ends at any one of amino acids 330-346 of SEQ ID NO: 505. In some embodiments, the endoglin:Cryptic protein heteromultimer comprises a polypeptide that is at least 70%, 75%, 80%, 85%, 90%, 91%, 92%, 93%, 94%, 95%, 95%, 96%, 97%, 98%, 99%, or 100% identical to a polypeptide that begins at any one of amino acids of 1-25 of SEQ ID NO: 509, and ends at any one of amino acids 148-164 of SEQ ID NO: 509. In some embodiments, the endoglin:Cryptic protein heteromultimer comprises a polypeptide that is at least 70%, 75%, 80%, 85%, 90%, 91%, 92%, 93%, 94%, 95%, 95%, 96%, 97%, 98%, 99%, or 100% identical to the amino acid sequence of any one of SEQ ID NOs: 521, 522, 525, 526, 529, or 530. In some embodiments, the endoglin:Cryptic protein heteromultimer comprises a polypeptide that is at least 70%, 75%, 80%, 85%, 90%, 91%, 92%, 93%, 94%, 95%, 95%, 96%, 97%, 98%, 99%, or 100% identical to a polypeptide that begins at any one of amino acids of 26-90 of SEQ ID NO: 521 and ends at any one of amino acids 157-233 of SEQ ID NO: 521. In some embodiments, the endoglin:Cryptic protein heteromultimer comprises a polypeptide that is at least 70%, 75%, 80%, 85%, 90%, 91%, 92%, 93%, 94%, 95%, 95%, 96%, 97%, 98%, 99%, or 100% identical to a polypeptide that begins at any one of amino acids of 26-30 of SEQ ID NO: 525 and ends at any one of amino acids 82-191 of SEQ ID NO: 525. In some embodiments, the endoglin:Cryptic protein heteromultimer comprises a polypeptide that is at least 70%, 75%, 80%, 85%, 90%, 91%, 92%, 93%, 94%, 95%, 95%, 96%, 97%, 98%, 99%, or 100% identical to a polypeptide that begins at any one of amino acids of 26-30 of SEQ ID NO: 529, and ends at any one of amino acids 82-148 of SEQ ID NO: 529. In certain preferred embodiments, endoglin:Cryptic protein heteromultimers are soluble. In some embodiments, a endoglin:Cryptic protein heteromultimer of the disclosure binds to one or more TGF-beta superfamily ligands (e.g., binds to one or more TGF-beta superfamily ligands with a K_{D} of at least 1×10⁻⁷). In some embodiments, a endoglin:Cryptic protein heteromultimer of the disclosure inhibits one or more TGF-beta superfamily ligands (e.g., inhibits Smad signaling). Heteromultimer-ligand binding and inhibition may be determined using a variety of assays including, for example, those described herein (e.g., in vitro binding and/or cell-based signaling assays). In some embodiments, a endoglin:Cryptic protein heteromultimer of the disclosure has a different TGF-beta ligand binding and/or inhibition profile (specificity) compared to a corresponding homomultimer (e.g., endoglin and Cryptic protein homomultimers). In some embodiments, a endoglin:Cryptic protein heteromultimer of the disclosure is a heterodimer.

[0154] In certain aspects, the disclosure relates to heteromultimers that comprise at least one endoglin polypeptide, which includes fragments, functional variants, and modified forms thereof, and at least one Cryptic family protein 1B polypeptide, which includes fragments, functional variants, and modified forms thereof. In some embodiments, the endoglin:Cryptic family protein 1B heteromultimer comprises a polypeptide that is at least 70%, 75%, 80%, 85%, 90%, 91%, 92%, 93%, 94%, 95%, 95%, 96%, 97%, 98%, 99%, or 100% identical to the amino acid sequence of any one of SEQ ID NOs: 501, 502, 505, 506, 509, 510, 593, or 594. In some embodiments, the endoglin:Cryptic family protein 1B heteromultimer comprises a polypeptide that is at least 70%, 75%, 80%, 85%, 90%, 91%, 92%, 93%, 94%, 95%, 95%, 96%, 97%, 98%, 99%, or 100% identical to a polypeptide that begins at any one of amino acids of 26-30 of SEQ ID NO: 501 and ends at any one of amino acids 330-346 of SEQ ID NO: 501. In some embodiments, the endoglin:Cryptic family protein 1B heteromultimer comprises a polypeptide that is at least 70%, 75%, 80%, 85%, 90%, 91%, 92%, 93%, 94%, 95%, 95%, 96%, 97%, 98%, 99%, or 100% identical to a polypeptide that begins at any one of amino acids of 26-30 of SEQ ID NO: 505 and ends at any one of amino acids 330-346 of SEQ ID NO: 505. In some embodiments, the endoglin:Cryptic family protein 1B heteromultimer comprises a polypeptide that is at least 70%, 75%, 80%, 85%, 90%, 91%, 92%, 93%, 94%, 95%, 95%, 96%, 97%, 98%, 99%, or 100% identical to a polypeptide that begins at any one of amino acids of 1-25 of SEQ ID NO: 509, and ends at any one of amino acids 148-164 of SEQ ID NO: 509. In some embodiments, the endoglin:Cryptic family protein 1B heteromultimer comprises a polypeptide that is at least 70%, 75%, 80%, 85%, 90%, 91%, 92%, 93%, 94%, 95%, 95%, 96%, 97%, 98%, 99%, or 100% identical to the amino acid sequence of any one of SEQ ID NOs: 533 or 534. In some embodiments, the endoglin:Cryptic family protein 1B heteromultimer comprises a polypeptide that is at least 70%, 75%, 80%, 85%, 90%, 91%, 92%, 93%, 94%, 95%, 95%, 96%, 97%, 98%, 99%, or 100% identical to a polypeptide that begins at any one of amino acids of 26-30 of SEQ ID NO: 533 and ends at any one of amino acids 82-223 of SEQ ID NO: 533. In certain preferred embodiments, endoglin:Cryptic family protein 1B heteromultimers are soluble. In some embodiments, a endoglin:Cryptic family protein 1B heteromultimer of the disclosure binds to one or more TGF-beta superfamily ligands (e.g., binds to one or more TGF-beta superfamily ligands with a K_{D} of at least 1×10⁻⁷). In some embodiments, a endoglin:Cryptic family protein 1B heteromultimer of the disclosure inhibits one or more TGF-beta superfamily ligands (e.g., inhibits Smad signaling). Heteromultimer-ligand binding and inhibition may be determined using a variety of assays including, for example, those described herein (e.g., in vitro binding and/or cell-based signaling assays). In some embodiments, a endoglin:Cryptic family protein 1B heteromultimer of the disclosure has a different TGF-beta ligand binding and/or inhibition profile (specificity) compared to a corresponding homomultimer (e.g., endoglin and Cryptic family protein 1B homomultimers). In some embodiments, a endoglin:Cryptic family protein 1B heteromultimer of the disclosure is a heterodimer.

[0155] In certain aspects, the disclosure relates to heteromultimers that comprise at least one endoglin polypeptide, which includes fragments, functional variants, and modified forms thereof, and at least one Crim1 polypeptide, which includes fragments, functional variants, and modified forms thereof. In some embodiments, the endoglin:Crim1 heteromultimer comprises a polypeptide that is at least 70%, 75%, 80%, 85%, 90%, 91%, 92%, 93%, 94%, 95%, 95%, 96%, 97%, 98%, 99%, or 100% identical to the amino acid sequence of any one of SEQ ID NOs: 501, 502, 505, 506, 509, 510, 593, or 594. In some embodiments, the endoglin:Crim1 heteromultimer comprises a polypeptide that is at least 70%, 75%, 80%, 85%, 90%, 91%, 92%, 93%, 94%, 95%, 95%, 96%, 97%, 98%, 99%, or 100% identical to a polypeptide that begins at any one of amino acids of 26-30 of SEQ ID NO: 501 and ends at any one of amino acids 330-346 of SEQ ID NO: 501. In some embodiments, the endoglin:Crim1 heteromultimer comprises a polypeptide that is at least 70%, 75%, 80%, 85%, 90%, 91%, 92%, 93%, 94%, 95%, 95%, 96%, 97%, 98%, 99%, or 100% identical to a polypeptide that begins at any one of amino acids of 26-30 of SEQ ID NO: 505 and ends at any one of amino acids 330-346 of SEQ ID NO: 505. In some embodiments, the endoglin:Crim1 heteromultimer comprises a polypeptide that is at least 70%, 75%, 80%, 85%, 90%, 91%, 92%, 93%, 94%, 95%, 95%, 96%, 97%, 98%, 99%, or 100% identical to a polypeptide that begins at any one of amino acids of 1-25 of SEQ ID NO: 509, and ends at any one of amino acids 148-164 of SEQ ID NO: 509. In some embodiments, the endoglin:Crim1 heteromultimer comprises a polypeptide that is at least 70%, 75%, 80%, 85%, 90%, 91%, 92%, 93%, 94%, 95%, 95%, 96%, 97%, 98%, 99%, or 100% identical to the amino acid sequence of any one of SEQ ID NOs: 537 or 538. In some embodiments, the endoglin:Crim1 heteromultimer comprises a polypeptide that is at least 70%, 75%, 80%, 85%, 90%, 91%, 92%, 93%, 94%, 95%, 95%, 96%, 97%, 98%, 99%, or 100% identical to a polypeptide that begins at any one of amino acids of 35-37 of SEQ ID NO: 537 and ends at any one of amino acids 873-939 of SEQ ID NO: 537. In certain preferred embodiments, endoglin:Crim1 heteromultimers are soluble. In some embodiments, a endoglin:Crim1 heteromultimer of the disclosure binds to one or more TGF-beta superfamily ligands (e.g., binds to one or more TGF-beta superfamily ligands with a K_{D} of at least 1×10⁻⁷). In some embodiments, a endoglin:Crim1 heteromultimer of the disclosure inhibits one or more TGF-beta superfamily ligands (e.g., inhibits Smad signaling). Heteromultimer-ligand binding and inhibition may be determined using a variety of assays including, for example, those described herein (e.g., in vitro binding and/or cell-based signaling assays). In some embodiments, a endoglin:Crim1 heteromultimer of the disclosure has a different TGF-beta ligand binding and/or inhibition profile (specificity) compared to a corresponding homomultimer (e.g., endoglin and Crim1 homomultimers). In some embodiments, a endoglin:Crim1 heteromultimer of the disclosure is a heterodimer.

[0156] In certain aspects, the disclosure relates to heteromultimers that comprise at least one endoglin polypeptide, which includes fragments, functional variants, and modified forms thereof, and at least one Crim2 polypeptide, which includes fragments, functional variants, and modified forms thereof. In some embodiments, the endoglin:Crim2 heteromultimer comprises a polypeptide that is at least 70%, 75%, 80%, 85%, 90%, 91%, 92%, 93%, 94%, 95%, 95%, 96%, 97%, 98%, 99%, or 100% identical to the amino acid sequence of any one of SEQ ID NOs: 501, 502, 505, 506, 509, 510, 593, or 594. In some embodiments, the endoglin:Crim2 heteromultimer comprises a polypeptide that is at least 70%, 75%, 80%, 85%, 90%, 91%, 92%, 93%, 94%, 95%, 95%, 96%, 97%, 98%, 99%, or 100% identical to a polypeptide that begins at any one of amino acids of 26-30 of SEQ ID NO: 501 and ends at any one of amino acids 330-346 of SEQ ID NO: 501. In some embodiments, the endoglin:Crim2 heteromultimer comprises a polypeptide that is at least 70%, 75%, 80%, 85%, 90%, 91%, 92%, 93%, 94%, 95%, 95%, 96%, 97%, 98%, 99%, or 100% identical to a polypeptide that begins at any one of amino acids of 26-30 of SEQ ID NO: 505 and ends at any one of amino acids 330-346 of SEQ ID NO: 505. In some embodiments, the endoglin:Crim2 heteromultimer comprises a polypeptide that is at least 70%, 75%, 80%, 85%, 90%, 91%, 92%, 93%, 94%, 95%, 95%, 96%, 97%, 98%, 99%, or 100% identical to a polypeptide that begins at any one of amino acids of 1-25 of SEQ ID NO: 509, and ends at any one of amino acids 148-164 of SEQ ID NO: 509. In some embodiments, the endoglin:Crim2 heteromultimer comprises a polypeptide that is at least 70%, 75%, 80%, 85%, 90%, 91%, 92%, 93%, 94%, 95%, 95%, 96%, 97%, 98%, 99%, or 100% identical to the amino acid sequence of any one of SEQ ID NOs: 541, 542, 545, or 546. In some embodiments, the endoglin:Crim2 heteromultimer comprises a polypeptide that is at least 70%, 75%, 80%, 85%, 90%, 91%, 92%, 93%, 94%, 95%, 95%, 96%, 97%, 98%, 99%, or 100% identical to a polypeptide that begins at any one of amino acids of 26-138 of SEQ ID NO: 541 and ends at any one of amino acids 1298-1503 of SEQ ID NO: 541. In some embodiments, the endoglin:Crim2 heteromultimer comprises a polypeptide that is at least 70%, 75%, 80%, 85%, 90%, 91%, 92%, 93%, 94%, 95%, 95%, 96%, 97%, 98%, 99%, or 100% identical to a polypeptide that begins at any one of amino acids of 24-138 of SEQ ID NO: 545 and ends at any one of amino acids 539-814 of SEQ ID NO: 545. In certain preferred embodiments, endoglin:Crim2 heteromultimers are soluble. In some embodiments, a endoglin:Crim2 heteromultimer of the disclosure binds to one or more TGF-beta superfamily ligands (e.g., binds to one or more TGF-beta superfamily ligands with a K_{D} of at least 1×10⁻⁷). In some embodiments, a endoglin:Crim2 heteromultimer of the disclosure inhibits one or more TGF-beta superfamily ligands (e.g., inhibits Smad signaling). Heteromultimer-ligand binding and inhibition may be determined using a variety of assays including, for example, those described herein (e.g., in vitro binding and/or cell-based signaling assays). In some embodiments, a endoglin:Crim2 heteromultimer of the disclosure has a different TGF-beta ligand binding and/or inhibition profile (specificity) compared to a corresponding homomultimer (e.g., endoglin and Crim2 homomultimers). In some embodiments, a endoglin:Crim2 heteromultimer of the disclosure is a heterodimer.

[0157] In certain aspects, the disclosure relates to heteromultimers that comprise at least one endoglin polypeptide, which includes fragments, functional variants, and modified forms thereof, and at least one BAMBI polypeptide, which includes fragments, functional variants, and modified forms thereof. In some embodiments, the endoglin:BAMBI heteromultimer comprises a polypeptide that is at least 70%, 75%, 80%, 85%, 90%, 91%, 92%, 93%, 94%, 95%, 95%, 96%, 97%, 98%, 99%, or 100% identical to the amino acid sequence of any one of SEQ ID NOs: 501, 502, 505, 506, 509, 510, 593, or 594. In some embodiments, the endoglin:BAMBI heteromultimer comprises a polypeptide that is at least 70%, 75%, 80%, 85%, 90%, 91%, 92%, 93%, 94%, 95%, 95%, 96%, 97%, 98%, 99%, or 100% identical to a polypeptide that begins at any one of amino acids of 26-30 of SEQ ID NO: 501 and ends at any one of amino acids 330-346 of SEQ ID NO: 501. In some embodiments, the endoglin:BAMBI heteromultimer comprises a polypeptide that is at least 70%, 75%, 80%, 85%, 90%, 91%, 92%, 93%, 94%, 95%, 95%, 96%, 97%, 98%, 99%, or 100% identical to a polypeptide that begins at any one of amino acids of 26-30 of SEQ ID NO: 505 and ends at any one of amino acids 330-346 of SEQ ID NO: 505. In some embodiments, the endoglin:BAMBI heteromultimer comprises a polypeptide that is at least 70%, 75%, 80%, 85%, 90%, 91%, 92%, 93%, 94%, 95%, 95%, 96%, 97%, 98%, 99%, or 100% identical to a polypeptide that begins at any one of amino acids of 1-25 of SEQ ID NO: 509, and ends at any one of amino acids 148-164 of SEQ ID NO: 509. In some embodiments, the endoglin:BAMBI heteromultimer comprises a polypeptide that is at least 70%, 75%, 80%, 85%, 90%, 91%, 92%, 93%, 94%, 95%, 95%, 96%, 97%, 98%, 99%, or 100% identical to the amino acid sequence of any one of SEQ ID NOs: 549 or 550. In some embodiments, the endoglin:BAMBI heteromultimer comprises a polypeptide that is at least 70%, 75%, 80%, 85%, 90%, 91%, 92%, 93%, 94%, 95%, 95%, 96%, 97%, 98%, 99%, or 100% identical to a polypeptide that begins at any one of amino acids of 21-30 of SEQ ID NO: 549 and ends at any one of amino acids 104-152 of SEQ ID NO: 549. In certain preferred embodiments, endoglin:BAMBI heteromultimers are soluble. In some embodiments, a endoglin:BAMBI heteromultimer of the disclosure binds to one or more TGF-beta superfamily ligands (e.g., binds to one or more TGF-beta superfamily ligands with a K_{D} of at least 1×10⁻⁷). In some embodiments, a endoglin:BAMBI heteromultimer of the disclosure inhibits one or more TGF-beta superfamily ligands (e.g., inhibits Smad signaling). Heteromultimer-ligand binding and inhibition may be determined using a variety of assays including, for example, those described herein (e.g., in vitro binding and/or cell-based signaling assays). In some embodiments, a endoglin:BAMBI heteromultimer of the disclosure has a different TGF-beta ligand binding and/or inhibition profile (specificity) compared to a corresponding homomultimer (e.g., endoglin and BAMBI homomultimers). In some embodiments, a endoglin:BAMBI heteromultimer of the disclosure is a heterodimer.

[0158] In certain aspects, the disclosure relates to heteromultimers that comprise at least one endoglin polypeptide, which includes fragments, functional variants, and modified forms thereof, and at least one BMPER polypeptide, which includes fragments, functional variants, and modified forms thereof. In some embodiments, the endoglin:BMPER heteromultimer comprises a polypeptide that is at least 70%, 75%, 80%, 85%, 90%, 91%, 92%, 93%, 94%, 95%, 95%, 96%, 97%, 98%, 99%, or 100% identical to the amino acid sequence of any one of SEQ ID NOs: 501, 502, 505, 506, 509, 510, 593, or 594. In some embodiments, the endoglin:BMPER heteromultimer comprises a polypeptide that is at least 70%, 75%, 80%, 85%, 90%, 91%, 92%, 93%, 94%, 95%, 95%, 96%, 97%, 98%, 99%, or 100% identical to a polypeptide that begins at any one of amino acids of 26-30 of SEQ ID NO: 501 and ends at any one of amino acids 330-346 of SEQ ID NO: 501. In some embodiments, the endoglin:BMPER heteromultimer comprises a polypeptide that is at least 70%, 75%, 80%, 85%, 90%, 91%, 92%, 93%, 94%, 95%, 95%, 96%, 97%, 98%, 99%, or 100% identical to a polypeptide that begins at any one of amino acids of 26-30 of SEQ ID NO: 505 and ends at any one of amino acids 330-346 of SEQ ID NO: 505. In some embodiments, the endoglin:BMPER heteromultimer comprises a polypeptide that is at least 70%, 75%, 80%, 85%, 90%, 91%, 92%, 93%, 94%, 95%, 95%, 96%, 97%, 98%, 99%, or 100% identical to a polypeptide that begins at any one of amino acids of 1-25 of SEQ ID NO: 509, and ends at any one of amino acids 148-164 of SEQ ID NO: 509. In some embodiments, the endoglin:BMPER heteromultimer comprises a polypeptide that is at least 70%, 75%, 80%, 85%, 90%, 91%, 92%, 93%, 94%, 95%, 95%, 96%, 97%, 98%, 99%, or 100% identical to the amino acid sequence of any one of SEQ ID NOs: 553 or 554. In some embodiments, the endoglin:BMPER heteromultimer comprises a polypeptide that is at least 70%, 75%, 80%, 85%, 90%, 91%, 92%, 93%, 94%, 95%, 95%, 96%, 97%, 98%, 99%, or 100% identical to a polypeptide that begins at any one of amino acids of 39-50 of SEQ ID NO: 553 and ends at any one of amino acids 364-369 of SEQ ID NO: 553. In some embodiments, the endoglin:BMPER heteromultimer comprises a polypeptide that is at least 70%, 75%, 80%, 85%, 90%, 91%, 92%, 93%, 94%, 95%, 95%, 96%, 97%, 98%, 99%, or 100% identical to a polypeptide that begins at any one of amino acids of 370-386 of SEQ ID NO: 553 and ends at any one of amino acids 682-685 of SEQ ID NO: 553. In some embodiments, the endoglin:BMPER heteromultimer comprises a polypeptide that is at least 70%, 75%, 80%, 85%, 90%, 91%, 92%, 93%, 94%, 95%, 95%, 96%, 97%, 98%, 99%, or 100% identical to a polypeptide that begins at any one of amino acids of 39-50 of SEQ ID NO: 553 and ends at any one of amino acids 682-685 of SEQ ID NO: 553. In some embodiments, the endoglin:BMPER heteromultimer comprises a BMPER protein, wherein the BMPER protein is a dimer comprising a first polypeptide that is at least 70%, 75%, 80%, 85%, 90%, 91%, 92%, 93%, 94%, 95%, 96%, 97%, 98%, 99%, or 100% identical to a polypeptide that begins at any one of amino acids of 39-50 of SEQ ID NO: 553 and ends at any one of amino acids 364-369 of SEQ ID NO: 553, and second polypeptide that is at least 70%, 75%, 80%, 85%, 90%, 91%, 92%, 93%, 94%, 95%, 96%, 97%, 98%, 99%, or 100% identical to a polypeptide that begins at any one of amino acids of 370-386 of SEQ ID NO: 553, and ends at any one of amino acids 682-685 of SEQ ID NO: 553. In some embodiments, the endoglin:BMPER heteromultimer comprises a single chain ligand trap that comprises a first BMPER polypeptide domain that is at least 70%, 75%, 80%, 85%, 90%, 91%, 92%, 93%, 94%, 95%, 96%, 97%, 98%, 99%, or 100% identical to a polypeptide that begins at any one of amino acids of 39-50 of SEQ ID NO: 553 and ends at any one of amino acids 364-369 of SEQ ID NO: 553, and second BMPER polypeptide domain that is at least 70%, 75%, 80%, 85%, 90%, 91%, 92%, 93%, 94%, 95%, 96%, 97%, 98%, 99%, or 100% identical to a polypeptide that begins at any one of amino acids of 370-386 of SEQ ID NO: 553 and ends at any one of amino acids 682-685 of SEQ ID NO: 553. In certain preferred embodiments, endoglin:BMPER heteromultimers are soluble. In some embodiments, a endoglin:BMPER heteromultimer of the disclosure binds to one or more TGF-beta superfamily ligands (e.g., binds to one or more TGF-beta superfamily ligands with a K_{D} of at least 1×10⁻⁷). In some embodiments, a endoglin:BMPER heteromultimer of the disclosure inhibits one or more TGF-beta superfamily ligands (e.g., inhibits Smad signaling). Heteromultimer-ligand binding and inhibition may be determined using a variety of assays including, for example, those described herein (e.g., in vitro binding and/or cell-based signaling assays). In some embodiments, a endoglin:BMPER heteromultimer of the disclosure has a different TGF-beta ligand binding and/or inhibition profile (specificity) compared to a corresponding homomultimer (e.g., endoglin and BMPER homomultimers). In some embodiments, a endoglin:BMPER heteromultimer of the disclosure is a heterodimer.

[0159] In certain aspects, the disclosure relates to heteromultimers that comprise at least one endoglin polypeptide, which includes fragments, functional variants, and modified forms thereof, and at least one RGM-A polypeptide, which includes fragments, functional variants, and modified forms thereof. In some embodiments, the endoglin:RGM-A heteromultimer comprises a polypeptide that is at least 70%, 75%, 80%, 85%, 90%, 91%, 92%, 93%, 94%, 95%, 95%, 96%, 97%, 98%, 99%, or 100% identical to the amino acid sequence of any one of SEQ ID NOs: 501, 502, 505, 506, 509, 510, 593, or 594. In some embodiments, the endoglin:RGM-A heteromultimer comprises a polypeptide that is at least 70%, 75%, 80%, 85%, 90%, 91%, 92%, 93%, 94%, 95%, 95%, 96%, 97%, 98%, 99%, or 100% identical to a polypeptide that begins at any one of amino acids of 26-30 of SEQ ID NO: 501 and ends at any one of amino acids 330-346 of SEQ ID NO: 501. In some embodiments, the endoglin:RGM-A heteromultimer comprises a polypeptide that is at least 70%, 75%, 80%, 85%, 90%, 91%, 92%, 93%, 94%, 95%, 95%, 96%, 97%, 98%, 99%, or 100% identical to a polypeptide that begins at any one of amino acids of 26-30 of SEQ ID NO: 505 and ends at any one of amino acids 330-346 of SEQ ID NO: 505. In some embodiments, the endoglin:RGM-A heteromultimer comprises a polypeptide that is at least 70%, 75%, 80%, 85%, 90%, 91%, 92%, 93%, 94%, 95%, 95%, 96%, 97%, 98%, 99%, or 100% identical to a polypeptide that begins at any one of amino acids of 1-25 of SEQ ID NO: 509, and ends at any one of amino acids 148-164 of SEQ ID NO: 509. In some embodiments, the endoglin:RGM-A heteromultimer comprises a polypeptide that is at least 70%, 75%, 80%, 85%, 90%, 91%, 92%, 93%, 94%, 95%, 95%, 96%, 97%, 98%, 99%, or 100% identical to the amino acid sequence of any one of SEQ ID NOs: 553 or 554. In some embodiments, the endoglin:RGM-A heteromultimer comprises a polypeptide that is at least 70%, 75%, 80%, 85%, 90%, 91%, 92%, 93%, 94%, 95%, 95%, 96%, 97%, 98%, 99%, or 100% identical to a polypeptide that begins at any one of amino acids of 1-177 of SEQ ID NO: 561 and ends at any one of amino acids 430-458 of SEQ ID NO: 561. In some embodiments, the endoglin:RGM-A heteromultimer comprises a polypeptide that is at least 70%, 75%, 80%, 85%, 90%, 91%, 92%, 93%, 94%, 95%, 95%, 96%, 97%, 98%, 99%, or 100% identical to a polypeptide that begins at any one of amino acids of 1-153 of SEQ ID NO: 565 and ends at any one of amino acids 406-434 of SEQ ID NO: 565. In some embodiments, the endoglin:RGM-A heteromultimer comprises a polypeptide that is at least 70%, 75%, 80%, 85%, 90%, 91%, 92%, 93%, 94%, 95%, 95%, 96%, 97%, 98%, 99%, or 100% identical to a polypeptide that begins at any one of amino acids of 1-169 of SEQ ID NO: 569 and ends at any one of amino acids 422-450 of SEQ ID NO: 569. In certain preferred embodiments, endoglin:RGM-A heteromultimers are soluble. In some embodiments, a endoglin:RGM-A heteromultimer of the disclosure binds to one or more TGF-beta superfamily ligands (e.g., binds to one or more TGF-beta superfamily ligands with a K_{D} of at least 1×10⁻⁷). In some embodiments, a endoglin:RGM-A heteromultimer of the disclosure inhibits one or more TGF-beta superfamily ligands (e.g., inhibits Smad signaling). Heteromultimer-ligand binding and inhibition may be determined using a variety of assays including, for example, those described herein (e.g., in vitro binding and/or cell-based signaling assays). In some embodiments, a endoglin:RGM-A heteromultimer of the disclosure has a different TGF-beta ligand binding and/or inhibition profile (specificity) compared to a corresponding homomultimer (e.g., endoglin and RGM-A homomultimers). In some embodiments, a endoglin:RGM-A heteromultimer of the disclosure is a heterodimer.

[0160] In certain aspects, the disclosure relates to heteromultimers that comprise at least one endoglin polypeptide, which includes fragments, functional variants, and modified forms thereof, and at least one RGM-B polypeptide, which includes fragments, functional variants, and modified forms thereof. In some embodiments, the endoglin:RGM-B heteromultimer comprises a polypeptide that is at least 70%, 75%, 80%, 85%, 90%, 91%, 92%, 93%, 94%, 95%, 95%, 96%, 97%, 98%, 99%, or 100% identical to the amino acid sequence of any one of SEQ ID NOs: 501, 502, 505, 506, 509, 510, 593, or 594. In some embodiments, the endoglin:RGM-B heteromultimer comprises a polypeptide that is at least 70%, 75%, 80%, 85%, 90%, 91%, 92%, 93%, 94%, 95%, 95%, 96%, 97%, 98%, 99%, or 100% identical to a polypeptide that begins at any one of amino acids of 26-30 of SEQ ID NO: 501 and ends at any one of amino acids 330-346 of SEQ ID NO: 501. In some embodiments, the endoglin:RGM-B heteromultimer comprises a polypeptide that is at least 70%, 75%, 80%, 85%, 90%, 91%, 92%, 93%, 94%, 95%, 95%, 96%, 97%, 98%, 99%, or 100% identical to a polypeptide that begins at any one of amino acids of 26-30 of SEQ ID NO: 505 and ends at any one of amino acids 330-346 of SEQ ID NO: 505. In some embodiments, the endoglin:RGM-B heteromultimer comprises a polypeptide that is at least 70%, 75%, 80%, 85%, 90%, 91%, 92%, 93%, 94%, 95%, 95%, 96%, 97%, 98%, 99%, or 100% identical to a polypeptide that begins at any one of amino acids of 1-25 of SEQ ID NO: 509, and ends at any one of amino acids 148-164 of SEQ ID NO: 509. In some embodiments, the endoglin:RGM-B heteromultimer comprises a polypeptide that is at least 70%, 75%, 80%, 85%, 90%, 91%, 92%, 93%, 94%, 95%, 95%, 96%, 97%, 98%, 99%, or 100% identical to the amino acid sequence of any one of SEQ ID NOs: 557 or 558. In some embodiments, the endoglin:RGM-B heteromultimer comprises a polypeptide that is at least 70%, 75%, 80%, 85%, 90%, 91%, 92%, 93%, 94%, 95%, 95%, 96%, 97%, 98%, 99%, or 100% identical to a polypeptide that begins at any one of amino acids of 1-87 of SEQ ID NO: 557 and ends at any one of amino acids 452-478 of SEQ ID NO: 557. In some embodiments, the endoglin:RGM-B heteromultimer comprises a polypeptide that is at least 70%, 75%, 80%, 85%, 90%, 91%, 92%, 93%, 94%, 95%, 95%, 96%, 97%, 98%, 99%, or 100% identical to a polypeptide that begins at any one of amino acids of 210-222 of SEQ ID NO: 557 and ends at any one of amino acids 413-452 of SEQ ID NO: 557. In some embodiments, the endoglin:RGM-B heteromultimer comprises a polypeptide that is at least 70%, 75%, 80%, 85%, 90%, 91%, 92%, 93%, 94%, 95%, 95%, 96%, 97%, 98%, 99%, or 100% identical to a polypeptide that begins at any one of amino acids of 87-95 of SEQ ID NO: 557 and ends at any one of amino acids 204-209 of SEQ ID NO: 557. In some embodiments, the endoglin:RGM-B heteromultimer comprises a RGM-B protein, wherein the RGM-B protein is a dimer comprising a first polypeptide that is at least 70%, 75%, 80%, 85%, 90%, 91%, 92%, 93%, 94%, 95%, 96%, 97%, 98%, 99%, or 100% identical to a polypeptide that begins at any one of amino acids of 87-95 of SEQ ID NO: 557 and ends at any one of amino acids 204-209 of SEQ ID NO: 557 and second polypeptide that is at least 70%, 75%, 80%, 85%, 90%, 91%, 92%, 93%, 94%, 95%, 96%, 97%, 98%, 99%, or 100% identical to a polypeptide that begins at any one of amino acids of 210-222 of SEQ ID NO: 557 and ends at any one of amino acids 413-452 of SEQ ID NO: 557. In some embodiments, the endoglin:RGM-B heteromultimer comprises a single chain ligand trap that comprises a first RGM-B polypeptide domain that is at least 70%, 75%, 80%, 85%, 90%, 91%, 92%, 93%, 94%, 95%, 96%, 97%, 98%, 99%, or 100% identical to a polypeptide that begins at any one of amino acids of 87-95 of SEQ ID NO: 557 and ends at any one of amino acids 204-209 of SEQ ID NO: 557 and second RGM-B polypeptide domain that is at least 70%, 75%, 80%, 85%, 90%, 91%, 92%, 93%, 94%, 95%, 96%, 97%, 98%, 99%, or 100% identical to a polypeptide that begins at any one of amino acids of 210-222 of SEQ ID NO: 557 and ends at any one of amino acids 413-452 of SEQ ID NO: 557. In certain preferred embodiments, endoglin:RGM-B heteromultimers are soluble. In some embodiments, a endoglin:RGM-B heteromultimer of the disclosure binds to one or more TGF-beta superfamily ligands (e.g., binds to one or more TGF-beta superfamily ligands with a K_{D} of at least 1×10⁻⁷). In some embodiments, a endoglin:RGM-B heteromultimer of the disclosure inhibits one or more TGF-beta superfamily ligands (e.g., inhibits Smad signaling). Heteromultimer-ligand binding and inhibition may be determined using a variety of assays including, for example, those described herein (e.g., in vitro binding and/or cell-based signaling assays). In some embodiments, a endoglin:RGM-B heteromultimer of the disclosure has a different TGF-beta ligand binding and/or inhibition profile (specificity) compared to a corresponding homomultimer (e.g., endoglin and RGM-B homomultimers). In some embodiments, a endoglin:RGM-B heteromultimer of the disclosure is a heterodimer.

[0161] In certain aspects, the disclosure relates to heteromultimers that comprise at least one endoglin polypeptide, which includes fragments, functional variants, and modified forms thereof, and at least one hemojuvelin polypeptide, which includes fragments, functional variants, and modified forms thereof. In some embodiments, the endoglin:hemojuvelin heteromultimer comprises a polypeptide that is at least 70%, 75%, 80%, 85%, 90%, 91%, 92%, 93%, 94%, 95%, 95%, 96%, 97%, 98%, 99%, or 100% identical to the amino acid sequence of any one of SEQ ID NOs: 501, 502, 505, 506, 509, 510, 593, or 594. In some embodiments, the endoglin:hemojuvelin heteromultimer comprises a polypeptide that is at least 70%, 75%, 80%, 85%, 90%, 91%, 92%, 93%, 94%, 95%, 95%, 96%, 97%, 98%, 99%, or 100% identical to a polypeptide that begins at any one of amino acids of 26-30 of SEQ ID NO: 501 and ends at any one of amino acids 330-346 of SEQ ID NO: 501. In some embodiments, the endoglin:hemojuvelin heteromultimer comprises a polypeptide that is at least 70%, 75%, 80%, 85%, 90%, 91%, 92%, 93%, 94%, 95%, 95%, 96%, 97%, 98%, 99%, or 100% identical to a polypeptide that begins at any one of amino acids of 26-30 of SEQ ID NO: 505 and ends at any one of amino acids 330-346 of SEQ ID NO: 505. In some embodiments, the endoglin:hemojuvelin heteromultimer comprises a polypeptide that is at least 70%, 75%, 80%, 85%, 90%, 91%, 92%, 93%, 94%, 95%, 95%, 96%, 97%, 98%, 99%, or 100% identical to a polypeptide that begins at any one of amino acids of 1-25 of SEQ ID NO: 509, and ends at any one of amino acids 148-164 of SEQ ID NO: 509. In some embodiments, the endoglin:hemojuvelin heteromultimer comprises a polypeptide that is at least 70%, 75%, 80%, 85%, 90%, 91%, 92%, 93%, 94%, 95%, 95%, 96%, 97%, 98%, 99%, or 100% identical to the amino acid sequence of any one of SEQ ID NOs: 573, 574, 577, 578, 581, or 582. In some embodiments, the endoglin:hemojuvelin heteromultimer comprises a polypeptide that is at least 70%, 75%, 80%, 85%, 90%, 91%, 92%, 93%, 94%, 95%, 95%, 96%, 97%, 98%, 99%, or 100% identical to a polypeptide that begins at any one of amino acids of 1-36 of SEQ ID NO: 573 and ends at any one of amino acids 400-426 of SEQ ID NO: 573. In some embodiments, the endoglin:hemojuvelin heteromultimer comprises a polypeptide that is at least 70%, 75%, 80%, 85%, 90%, 91%, 92%, 93%, 94%, 95%, 95%, 96%, 97%, 98%, 99%, or 100% identical to a polypeptide that begins at any one of amino acids of 36-42 of SEQ ID NO: 573 and ends at any one of amino acids 167-172 of SEQ ID NO: 573. In some embodiments, the endoglin:hemojuvelin heteromultimer comprises a polypeptide that is at least 70%, 75%, 80%, 85%, 90%, 91%, 92%, 93%, 94%, 95%, 95%, 96%, 97%, 98%, 99%, or 100% identical to a polypeptide that begins at any one of amino acids of 173-185 of SEQ ID NO: 573 and ends at any one of amino acids 361-400 of SEQ ID NO: 573. In some embodiments, the endoglin:hemojuvelin heteromultimer comprises a hemojuvelin protein that is a dimer comprising a first polypeptide that is at least 70%, 75%, 80%, 85%, 90%, 91%, 92%, 93%, 94%, 95%, 96%, 97%, 98%, 99%, or 100% identical to a polypeptide that begins at any one of amino acids of 36-42 of SEQ ID NO: 573, and ends at any one of amino acids 167-172 of SEQ ID NO: 573 and second polypeptide that is at least 70%, 75%, 80%, 85%, 90%, 91%, 92%, 93%, 94%, 95%, 96%, 97%, 98%, 99%, or 100% identical to a polypeptide that begins at any one of amino acids of 173-185 of SEQ ID NO: 573 and ends at any one of amino acids 361-400 of SEQ ID NO: 573. In some embodiments, the endoglin:hemojuvelin heteromultimer comprises a single chain ligand trap that comprises a first hemojuvelin polypeptide domain that is at least 70%, 75%, 80%, 85%, 90%, 91%, 92%, 93%, 94%, 95%, 96%, 97%, 98%, 99%, or 100% identical to a polypeptide that begins at any one of amino acids of 36-42 of SEQ ID NO: 573 and ends at any one of amino acids 167-172 of SEQ ID NO: 573 and second hemojuvelin polypeptide domain that is at least 70%, 75%, 80%, 85%, 90%, 91%, 92%, 93%, 94%, 95%, 96%, 97%, 98%, 99%, or 100% identical to a polypeptide that begins at any one of amino acids of 173-185 of SEQ ID NO: 573 and ends at any one of amino acids 361-400 of SEQ ID NO: 573. In some embodiments, the endoglin:hemojuvelin heteromultimer comprises a polypeptide that is at least 70%, 75%, 80%, 85%, 90%, 91%, 92%, 93%, 94%, 95%, 95%, 96%, 97%, 98%, 99%, or 100% identical to a polypeptide that begins at any one of amino acids of 1-6 of SEQ ID NO: 577 and ends at any one of amino acids 287-313 of SEQ ID NO: 577. In some embodiments, the endoglin:hemojuvelin heteromultimer comprises a polypeptide that is at least 70%, 75%, 80%, 85%, 90%, 91%, 92%, 93%, 94%, 95%, 95%, 96%, 97%, 98%, 99%, or 100% identical to a polypeptide that begins at any one of amino acids of 1-6 of SEQ ID NO: 577 and ends at any one of amino acids 54-59 of SEQ ID NO: 577. In some embodiments, the endoglin:hemojuvelin heteromultimer comprises a polypeptide that is at least 70%, 75%, 80%, 85%, 90%, 91%, 92%, 93%, 94%, 95%, 95%, 96%, 97%, 98%, 99%, or 100% identical to a polypeptide that begins at any one of amino acids of 60-72 of SEQ ID NO: 577 and ends at any one of amino acids 248-287 of SEQ ID NO: 577. In some embodiments, the endoglin:hemojuvelin heteromultimer comprises a hemojuvelin protein, wherein the hemojuvelin protein is a dimer comprising a first polypeptide that is at least 70%, 75%, 80%, 85%, 90%, 91%, 92%, 93%, 94%, 95%, 96%, 97%, 98%, 99%, or 100% identical to a polypeptide that begins at any one of amino acids of 1-6 of SEQ ID NO: 577 and ends at any one of amino acids 54-59 of SEQ ID NO: 577, and second polypeptide that is at least 70%, 75%, 80%, 85%, 90%, 91%, 92%, 93%, 94%, 95%, 96%, 97%, 98%, 99%, or 100% identical to a polypeptide that begins at any one of amino acids of 60-72 of SEQ ID NO: 577 and ends at any one of amino acids 248-287 of SEQ ID NO: 577. In some embodiments, the endoglin:hemojuvelin heteromultimer comprises a single chain ligand trap that comprises a first hemojuvelin polypeptide domain that is at least 70%, 75%, 80%, 85%, 90%, 91%, 92%, 93%, 94%, 95%, 96%, 97%, 98%, 99%, or 100% identical to a polypeptide that begins at any one of amino acids of 1-6 of SEQ ID NO: 577 and ends at any one of amino acids 54-59 of SEQ ID NO: 577, and second hemojuvelin polypeptide domain that is at least 70%, 75%, 80%, 85%, 90%, 91%, 92%, 93%, 94%, 95%, 96%, 97%, 98%, 99%, or 100% identical to a polypeptide that begins at any one of amino acids of 60-72 of SEQ ID NO: 577, and ends at any one of amino acids 248-287 of SEQ ID NO: 577. In some embodiments, the endoglin:hemojuvelin heteromultimer comprises a polypeptide that is at least 70%, 75%, 80%, 85%, 90%, 91%, 92%, 93%, 94%, 95%, 95%, 96%, 97%, 98%, 99%, or 100% identical to a polypeptide that begins at any one of amino acids of 1-4 of SEQ ID NO: 581 and ends at any one of amino acids 135-200 of SEQ ID NO: 581. In certain preferred embodiments, endoglin:hemojuvelin heteromultimers are soluble. In some embodiments, a endoglin:hemojuvelin heteromultimer of the disclosure binds to one or more TGF-beta superfamily ligands (e.g., binds to one or more TGF-beta superfamily ligands with a K_{D} of at least 1×10⁻⁷). In some embodiments, a endoglin:hemojuvelin heteromultimer of the disclosure inhibits one or more TGF-beta superfamily ligands (e.g., inhibits Smad signaling). Heteromultimer-ligand binding and inhibition may be determined using a variety of assays including, for example, those described herein (e.g., in vitro binding and/or cell-based signaling assays). In some embodiments, a endoglin:hemojuvelin heteromultimer of the disclosure has a different TGF-beta ligand binding and/or inhibition profile (specificity) compared to a corresponding homomultimer (e.g., endoglin and hemojuvelin homomultimers). In some embodiments, a endoglin:hemojuvelin heteromultimer of the disclosure is a heterodimer.

[0162] In certain aspects, the disclosure relates to heteromultimers that comprise at least one betaglycan polypeptide, which includes fragments, functional variants, and modified forms thereof, and at least one Cripto-1 polypeptide, which includes fragments, functional variants, and modified forms thereof. In some embodiments, the betaglycan:Cripto-1 heteromultimer comprises a polypeptide that is at least 70%, 75%, 80%, 85%, 90%, 91%, 92%, 93%, 94%, 95%, 95%, 96%, 97%, 98%, 99%, or 100% identical to the amino acid sequence of any one of SEQ ID NOs: 585, 586, 589, or 590. In some embodiments, the betaglycan:Cripto-1 heteromultimer comprises a polypeptide that is at least 70%, 75%, 80%, 85%, 90%, 91%, 92%, 93%, 94%, 95%, 95%, 96%, 97%, 98%, 99%, or 100% identical to a polypeptide that begins at any one of amino acids of 21-28 of SEQ ID NO: 585 and ends at any one of amino acids 381-787 of SEQ ID NO: 585. In some embodiments, the betaglycan:Cripto-1 heteromultimer comprises a polypeptide that is at least 70%, 75%, 80%, 85%, 90%, 91%, 92%, 93%, 94%, 95%, 95%, 96%, 97%, 98%, 99%, or 100% identical to a polypeptide that begins at any one of amino acids of 21-28 of SEQ ID NO: 589 and ends at any one of amino acids 380-786 of SEQ ID NO: 589. In some embodiments, the betaglycan:Cripto-1 heteromultimer comprises a polypeptide that is at least 70%, 75%, 80%, 85%, 90%, 91%, 92%, 93%, 94%, 95%, 95%, 96%, 97%, 98%, 99%, or 100% identical to the amino acid sequence of any one of SEQ ID NOs: 513, 514, 517, or 518. In some embodiments, the betaglycan:Cripto-1 heteromultimer comprises a polypeptide that is at least 70%, 75%, 80%, 85%, 90%, 91%, 92%, 93%, 94%, 95%, 95%, 96%, 97%, 98%, 99%, or 100% identical to a polypeptide that begins at any one of amino acids of 31-82 of SEQ ID NO: 513 and ends at any one of amino acids 172-188 of SEQ ID NO: 513. In some embodiments, the betaglycan:Cripto-1 heteromultimer comprises a polypeptide that is at least 70%, 75%, 80%, 85%, 90%, 91%, 92%, 93%, 94%, 95%, 95%, 96%, 97%, 98%, 99%, or 100% identical to a polypeptide that begins at any one of amino acids of 15-66 of SEQ ID NO: 517, and ends at any one of amino acids 156-172 of SEQ ID NO: 517. In certain preferred embodiments, betaglycan:Cripto-1 heteromultimers are soluble. In some embodiments, a betaglycan:Cripto-1 heteromultimer of the disclosure binds to one or more TGF-beta superfamily ligands (e.g., binds to one or more TGF-beta superfamily ligands with a K_{D} of at least 1×10⁻⁷). In some embodiments, a betaglycan:Cripto-1 heteromultimer of the disclosure inhibits one or more TGF-beta superfamily ligands (e.g., inhibits Smad signaling). Heteromultimer-ligand binding and inhibition may be determined using a variety of assays including, for example, those described herein (e.g., in vitro binding and/or cell-based signaling assays). In some embodiments, a betaglycan:Cripto-1 heteromultimer of the disclosure has a different TGF-beta ligand binding and/or inhibition profile (specificity) compared to a corresponding homomultimer (e.g., betaglycan and Cripto-1 homomultimers). In some embodiments, a betaglycan:Cripto-1 heteromultimer of the disclosure is a heterodimer.

[0163] In certain aspects, the disclosure relates to heteromultimers that comprise at least one betaglycan polypeptide, which includes fragments, functional variants, and modified forms thereof, and at least one Cryptic protein polypeptide, which includes fragments, functional variants, and modified forms thereof. In some embodiments, the betaglycan:Cryptic protein heteromultimer comprises a polypeptide that is at least 70%, 75%, 80%, 85%, 90%, 91%, 92%, 93%, 94%, 95%, 95%, 96%, 97%, 98%, 99%, or 100% identical to the amino acid sequence of any one of SEQ ID NOs: 585, 586, 589, or 590. In some embodiments, the betaglycan:Cryptic protein heteromultimer comprises a polypeptide that is at least 70%, 75%, 80%, 85%, 90%, 91%, 92%, 93%, 94%, 95%, 95%, 96%, 97%, 98%, 99%, or 100% identical to a polypeptide that begins at any one of amino acids of 21-28 of SEQ ID NO: 585 and ends at any one of amino acids 381-787 of SEQ ID NO: 585. In some embodiments, the betaglycan:Cryptic protein heteromultimer comprises a polypeptide that is at least 70%, 75%, 80%, 85%, 90%, 91%, 92%, 93%, 94%, 95%, 95%, 96%, 97%, 98%, 99%, or 100% identical to a polypeptide that begins at any one of amino acids of 21-28 of SEQ ID NO: 589 and ends at any one of amino acids 380-786 of SEQ ID NO: 589. In some embodiments, the betaglycan:Cryptic protein heteromultimer comprises a polypeptide that is at least 70%, 75%, 80%, 85%, 90%, 91%, 92%, 93%, 94%, 95%, 95%, 96%, 97%, 98%, 99%, or 100% identical to the amino acid sequence of any one of SEQ ID NOs: 521, 522, 525, 526, 529, or 530. In some embodiments, the betaglycan:Cryptic protein heteromultimer comprises a polypeptide that is at least 70%, 75%, 80%, 85%, 90%, 91%, 92%, 93%, 94%, 95%, 95%, 96%, 97%, 98%, 99%, or 100% identical to a polypeptide that begins at any one of amino acids of 26-90 of SEQ ID NO: 521 and ends at any one of amino acids 157-233 of SEQ ID NO: 521. In some embodiments, the betaglycan:Cryptic protein heteromultimer comprises a polypeptide that is at least 70%, 75%, 80%, 85%, 90%, 91%, 92%, 93%, 94%, 95%, 95%, 96%, 97%, 98%, 99%, or 100% identical to a polypeptide that begins at any one of amino acids of 26-30 of SEQ ID NO: 525 and ends at any one of amino acids 82-191 of SEQ ID NO: 525. In some embodiments, the betaglycan:Cryptic protein heteromultimer comprises a polypeptide that is at least 70%, 75%, 80%, 85%, 90%, 91%, 92%, 93%, 94%, 95%, 95%, 96%, 97%, 98%, 99%, or 100% identical to a polypeptide that begins at any one of amino acids of 26-30 of SEQ ID NO: 529, and ends at any one of amino acids 82-148 of SEQ ID NO: 529. In certain preferred embodiments, betaglycan:Cryptic protein heteromultimers are soluble. In some embodiments, a betaglycan:Cryptic protein heteromultimer of the disclosure binds to one or more TGF-beta superfamily ligands (e.g., binds to one or more TGF-beta superfamily ligands with a K_{D} of at least 1×10⁻⁷). In some embodiments, a betaglycan:Cryptic protein heteromultimer of the disclosure inhibits one or more TGF-beta superfamily ligands (e.g., inhibits Smad signaling). Heteromultimer-ligand binding and inhibition may be determined using a variety of assays including, for example, those described herein (e.g., in vitro binding and/or cell-based signaling assays). In some embodiments, a betaglycan:Cryptic protein heteromultimer of the disclosure has a different TGF-beta ligand binding and/or inhibition profile (specificity) compared to a corresponding homomultimer (e.g., betaglycan and Cryptic protein homomultimers). In some embodiments, a betaglycan:Cryptic protein heteromultimer of the disclosure is a heterodimer.

[0164] In certain aspects, the disclosure relates to heteromultimers that comprise at least one betaglycan polypeptide, which includes fragments, functional variants, and modified forms thereof, and at least one Cryptic family protein 1B polypeptide, which includes fragments, functional variants, and modified forms thereof. In some embodiments, the betaglycan:Cryptic family protein 1B heteromultimer comprises a polypeptide that is at least 70%, 75%, 80%, 85%, 90%, 91%, 92%, 93%, 94%, 95%, 95%, 96%, 97%, 98%, 99%, or 100% identical to the amino acid sequence of any one of SEQ ID NOs: 585, 586, 589, or 590. In some embodiments, the betaglycan:Cryptic family protein 1B heteromultimer comprises a polypeptide that is at least 70%, 75%, 80%, 85%, 90%, 91%, 92%, 93%, 94%, 95%, 95%, 96%, 97%, 98%, 99%, or 100% identical to a polypeptide that begins at any one of amino acids of 21-28 of SEQ ID NO: 585 and ends at any one of amino acids 381-787 of SEQ ID NO: 585. In some embodiments, the betaglycan:Cryptic family protein 1B heteromultimer comprises a polypeptide that is at least 70%, 75%, 80%, 85%, 90%, 91%, 92%, 93%, 94%, 95%, 95%, 96%, 97%, 98%, 99%, or 100% identical to a polypeptide that begins at any one of amino acids of 21-28 of SEQ ID NO: 589 and ends at any one of amino acids 380-786 of SEQ ID NO: 589. In some embodiments, the betaglycan:Cryptic family protein 1B heteromultimer comprises a polypeptide that is at least 70%, 75%, 80%, 85%, 90%, 91%, 92%, 93%, 94%, 95%, 95%, 96%, 97%, 98%, 99%, or 100% identical to the amino acid sequence of any one of SEQ ID NOs: 533 or 534. In some embodiments, the betaglycan:Cryptic family protein 1B heteromultimer comprises a polypeptide that is at least 70%, 75%, 80%, 85%, 90%, 91%, 92%, 93%, 94%, 95%, 95%, 96%, 97%, 98%, 99%, or 100% identical to a polypeptide that begins at any one of amino acids of 26-30 of SEQ ID NO: 533 and ends at any one of amino acids 82-223 of SEQ ID NO: 533. In certain preferred embodiments, betaglycan:Cryptic family protein 1B heteromultimers are soluble. In some embodiments, a betaglycan:Cryptic family protein 1B heteromultimer of the disclosure binds to one or more TGF-beta superfamily ligands (e.g., binds to one or more TGF-beta superfamily ligands with a K_{D} of at least 1×10⁻⁷). In some embodiments, a betaglycan:Cryptic family protein 1B heteromultimer of the disclosure inhibits one or more TGF-beta superfamily ligands (e.g., inhibits Smad signaling). Heteromultimer-ligand binding and inhibition may be determined using a variety of assays including, for example, those described herein (e.g., in vitro binding and/or cell-based signaling assays). In some embodiments, a betaglycan:Cryptic family protein 1B heteromultimer of the disclosure has a different TGF-beta ligand binding and/or inhibition profile (specificity) compared to a corresponding homomultimer (e.g., betaglycan and Cryptic family protein 1B homomultimers). In some embodiments, a betaglycan:Cryptic family protein 1B heteromultimer of the disclosure is a heterodimer.

[0165] In certain aspects, the disclosure relates to heteromultimers that comprise at least one betaglycan polypeptide, which includes fragments, functional variants, and modified forms thereof, and at least one Crim1 polypeptide, which includes fragments, functional variants, and modified forms thereof. In some embodiments, the betaglycan:Crim1 heteromultimer comprises a polypeptide that is at least 70%, 75%, 80%, 85%, 90%, 91%, 92%, 93%, 94%, 95%, 95%, 96%, 97%, 98%, 99%, or 100% identical to the amino acid sequence of any one of SEQ ID NOs: 585, 586, 589, or 590. In some embodiments, the betaglycan:Crim1 heteromultimer comprises a polypeptide that is at least 70%, 75%, 80%, 85%, 90%, 91%, 92%, 93%, 94%, 95%, 95%, 96%, 97%, 98%, 99%, or 100% identical to a polypeptide that begins at any one of amino acids of 21-28 of SEQ ID NO: 585 and ends at any one of amino acids 381-787 of SEQ ID NO: 585. In some embodiments, the betaglycan:Crim1 heteromultimer comprises a polypeptide that is at least 70%, 75%, 80%, 85%, 90%, 91%, 92%, 93%, 94%, 95%, 95%, 96%, 97%, 98%, 99%, or 100% identical to a polypeptide that begins at any one of amino acids of 21-28 of SEQ ID NO: 589 and ends at any one of amino acids 380-786 of SEQ ID NO: 589. In some embodiments, the betaglycan:Crim1 heteromultimer comprises a polypeptide that is at least 70%, 75%, 80%, 85%, 90%, 91%, 92%, 93%, 94%, 95%, 95%, 96%, 97%, 98%, 99%, or 100% identical to the amino acid sequence of any one of SEQ ID NOs: 537 or 538. In some embodiments, the betaglycan:Crim1 heteromultimer comprises a polypeptide that is at least 70%, 75%, 80%, 85%, 90%, 91%, 92%, 93%, 94%, 95%, 95%, 96%, 97%, 98%, 99%, or 100% identical to a polypeptide that begins at any one of amino acids of 35-37 of SEQ ID NO: 537 and ends at any one of amino acids 873-939 of SEQ ID NO: 537. In certain preferred embodiments, betaglycan:Crim1 heteromultimers are soluble. In some embodiments, a betaglycan:Crim1 heteromultimer of the disclosure binds to one or more TGF-beta superfamily ligands (e.g., binds to one or more TGF-beta superfamily ligands with a K_{D} of at least 1×10⁻⁷). In some embodiments, a betaglycan:Crim1 heteromultimer of the disclosure inhibits one or more TGF-beta superfamily ligands (e.g., inhibits Smad signaling). Heteromultimer-ligand binding and inhibition may be determined using a variety of assays including, for example, those described herein (e.g., in vitro binding and/or cell-based signaling assays). In some embodiments, a betaglycan:Crim1 heteromultimer of the disclosure has a different TGF-beta ligand binding and/or inhibition profile (specificity) compared to a corresponding homomultimer (e.g., betaglycan and Crim1 homomultimers). In some embodiments, a betaglycan:Crim1 heteromultimer of the disclosure is a heterodimer.

[0166] In certain aspects, the disclosure relates to heteromultimers that comprise at least one betaglycan polypeptide, which includes fragments, functional variants, and modified forms thereof, and at least one Crim2 polypeptide, which includes fragments, functional variants, and modified forms thereof. In some embodiments, the betaglycan:Crim2 heteromultimer comprises a polypeptide that is at least 70%, 75%, 80%, 85%, 90%, 91%, 92%, 93%, 94%, 95%, 95%, 96%, 97%, 98%, 99%, or 100% identical to the amino acid sequence of any one of SEQ ID NOs: 585, 586, 589, or 590. In some embodiments, the betaglycan:Crim2 heteromultimer comprises a polypeptide that is at least 70%, 75%, 80%, 85%, 90%, 91%, 92%, 93%, 94%, 95%, 95%, 96%, 97%, 98%, 99%, or 100% identical to a polypeptide that begins at any one of amino acids of 21-28 of SEQ ID NO: 585 and ends at any one of amino acids 381-787 of SEQ ID NO: 585. In some embodiments, the betaglycan:Crim2 heteromultimer comprises a polypeptide that is at least 70%, 75%, 80%, 85%, 90%, 91%, 92%, 93%, 94%, 95%, 95%, 96%, 97%, 98%, 99%, or 100% identical to a polypeptide that begins at any one of amino acids of 21-28 of SEQ ID NO: 589 and ends at any one of amino acids 380-786 of SEQ ID NO: 589. In some embodiments, the betaglycan:Crim2 heteromultimer comprises a polypeptide that is at least 70%, 75%, 80%, 85%, 90%, 91%, 92%, 93%, 94%, 95%, 95%, 96%, 97%, 98%, 99%, or 100% identical to the amino acid sequence of any one of SEQ ID NOs: 541, 542, 545, or 546. In some embodiments, the betaglycan:Crim2 heteromultimer comprises a polypeptide that is at least 70%, 75%, 80%, 85%, 90%, 91%, 92%, 93%, 94%, 95%, 95%, 96%, 97%, 98%, 99%, or 100% identical to a polypeptide that begins at any one of amino acids of 26-138 of SEQ ID NO: 541 and ends at any one of amino acids 1298-1503 of SEQ ID NO: 541. In some embodiments, the betaglycan:Crim2 heteromultimer comprises a polypeptide that is at least 70%, 75%, 80%, 85%, 90%, 91%, 92%, 93%, 94%, 95%, 95%, 96%, 97%, 98%, 99%, or 100% identical to a polypeptide that begins at any one of amino acids of 24-138 of SEQ ID NO: 545 and ends at any one of amino acids 539-814 of SEQ ID NO: 545. In certain preferred embodiments, betaglycan:Crim2 heteromultimers are soluble. In some embodiments, a betaglycan:Crim2 heteromultimer of the disclosure binds to one or more TGF-beta superfamily ligands (e.g., binds to one or more TGF-beta superfamily ligands with a K_{D} of at least 1×10⁻⁷). In some embodiments, a betaglycan:Crim2 heteromultimer of the disclosure inhibits one or more TGF-beta superfamily ligands (e.g., inhibits Smad signaling). Heteromultimer-ligand binding and inhibition may be determined using a variety of assays including, for example, those described herein (e.g., in vitro binding and/or cell-based signaling assays). In some embodiments, a betaglycan:Crim2 heteromultimer of the disclosure has a different TGF-beta ligand binding and/or inhibition profile (specificity) compared to a corresponding homomultimer (e.g., betaglycan and Crim2 homomultimers). In some embodiments, a betaglycan:Crim2 heteromultimer of the disclosure is a heterodimer.

[0167] In certain aspects, the disclosure relates to heteromultimers that comprise at least one betaglycan polypeptide, which includes fragments, functional variants, and modified forms thereof, and at least one BAMBI polypeptide, which includes fragments, functional variants, and modified forms thereof. In some embodiments, the betaglycan:BAMBI heteromultimer comprises a polypeptide that is at least 70%, 75%, 80%, 85%, 90%, 91%, 92%, 93%, 94%, 95%, 95%, 96%, 97%, 98%, 99%, or 100% identical to the amino acid sequence of any one of SEQ ID NOs: 585, 586, 589, or 590. In some embodiments, the betaglycan:BAMBI heteromultimer comprises a polypeptide that is at least 70%, 75%, 80%, 85%, 90%, 91%, 92%, 93%, 94%, 95%, 95%, 96%, 97%, 98%, 99%, or 100% identical to a polypeptide that begins at any one of amino acids of 21-28 of SEQ ID NO: 585 and ends at any one of amino acids 381-787 of SEQ ID NO: 585. In some embodiments, the betaglycan:BAMBI heteromultimer comprises a polypeptide that is at least 70%, 75%, 80%, 85%, 90%, 91%, 92%, 93%, 94%, 95%, 95%, 96%, 97%, 98%, 99%, or 100% identical to a polypeptide that begins at any one of amino acids of 21-28 of SEQ ID NO: 589 and ends at any one of amino acids 380-786 of SEQ ID NO: 589. In some embodiments, the betaglycan:BAMBI heteromultimer comprises a polypeptide that is at least 70%, 75%, 80%, 85%, 90%, 91%, 92%, 93%, 94%, 95%, 95%, 96%, 97%, 98%, 99%, or 100% identical to the amino acid sequence of any one of SEQ ID NOs: 549 or 550. In some embodiments, the betaglycan:BAMBI heteromultimer comprises a polypeptide that is at least 70%, 75%, 80%, 85%, 90%, 91%, 92%, 93%, 94%, 95%, 95%, 96%, 97%, 98%, 99%, or 100% identical to a polypeptide that begins at any one of amino acids of 21-30 of SEQ ID NO: 549 and ends at any one of amino acids 104-152 of SEQ ID NO: 549. In certain preferred embodiments, betaglycan:BAMBI heteromultimers are soluble. In some embodiments, a betaglycan:BAMBI heteromultimer of the disclosure binds to one or more TGF-beta superfamily ligands (e.g., binds to one or more TGF-beta superfamily ligands with a K_{D} of at least 1×10⁻⁷). In some embodiments, a betaglycan:BAMBI heteromultimer of the disclosure inhibits one or more TGF-beta superfamily ligands (e.g., inhibits Smad signaling). Heteromultimer-ligand binding and inhibition may be determined using a variety of assays including, for example, those described herein (e.g., in vitro binding and/or cell-based signaling assays). In some embodiments, a betaglycan:BAMBI heteromultimer of the disclosure has a different TGF-beta ligand binding and/or inhibition profile (specificity) compared to a corresponding homomultimer (e.g., betaglycan and BAMBI homomultimers). In some embodiments, a betaglycan:BAMBI heteromultimer of the disclosure is a heterodimer.

[0168] In certain aspects, the disclosure relates to heteromultimers that comprise at least one betaglycan polypeptide, which includes fragments, functional variants, and modified forms thereof, and at least one BMPER polypeptide, which includes fragments, functional variants, and modified forms thereof. In some embodiments, the betaglycan:BMPER heteromultimer comprises a polypeptide that is at least 70%, 75%, 80%, 85%, 90%, 91%, 92%, 93%, 94%, 95%, 95%, 96%, 97%, 98%, 99%, or 100% identical to the amino acid sequence of any one of SEQ ID NOs: 585, 586, 589, or 590. In some embodiments, the betaglycan:BMPER heteromultimer comprises a polypeptide that is at least 70%, 75%, 80%, 85%, 90%, 91%, 92%, 93%, 94%, 95%, 95%, 96%, 97%, 98%, 99%, or 100% identical to a polypeptide that begins at any one of amino acids of 21-28 of SEQ ID NO: 585 and ends at any one of amino acids 381-787 of SEQ ID NO: 585. In some embodiments, the betaglycan:BMPER heteromultimer comprises a polypeptide that is at least 70%, 75%, 80%, 85%, 90%, 91%, 92%, 93%, 94%, 95%, 95%, 96%, 97%, 98%, 99%, or 100% identical to a polypeptide that begins at any one of amino acids of 21-28 of SEQ ID NO: 589 and ends at any one of amino acids 380-786 of SEQ ID NO: 589. In some embodiments, the betaglycan:BMPER heteromultimer comprises a polypeptide that is at least 70%, 75%, 80%, 85%, 90%, 91%, 92%, 93%, 94%, 95%, 95%, 96%, 97%, 98%, 99%, or 100% identical to the amino acid sequence of any one of SEQ ID NOs: 553 or 554. In some embodiments, the betaglycan:BMPER heteromultimer comprises a polypeptide that is at least 70%, 75%, 80%, 85%, 90%, 91%, 92%, 93%, 94%, 95%, 95%, 96%, 97%, 98%, 99%, or 100% identical to a polypeptide that begins at any one of amino acids of 39-50 of SEQ ID NO: 553 and ends at any one of amino acids 364-369 of SEQ ID NO: 553. In some embodiments, the betaglycan:BMPER heteromultimer comprises a polypeptide that is at least 70%, 75%, 80%, 85%, 90%, 91%, 92%, 93%, 94%, 95%, 95%, 96%, 97%, 98%, 99%, or 100% identical to a polypeptide that begins at any one of amino acids of 370-386 of SEQ ID NO: 553 and ends at any one of amino acids 682-685 of SEQ ID NO: 553. In some embodiments, the betaglycan:BMPER heteromultimer comprises a polypeptide that is at least 70%, 75%, 80%, 85%, 90%, 91%, 92%, 93%, 94%, 95%, 95%, 96%, 97%, 98%, 99%, or 100% identical to a polypeptide that begins at any one of amino acids of 39-50 of SEQ ID NO: 553 and ends at any one of amino acids 682-685 of SEQ ID NO: 553. In some embodiments, the betaglycan:BMPER heteromultimer comprises a BMPER protein, wherein the BMPER protein is a dimer comprising a first polypeptide that is at least 70%, 75%, 80%, 85%, 90%, 91%, 92%, 93%, 94%, 95%, 96%, 97%, 98%, 99%, or 100% identical to a polypeptide that begins at any one of amino acids of 39-50 of SEQ ID NO: 553 and ends at any one of amino acids 364-369 of SEQ ID NO: 553, and second polypeptide that is at least 70%, 75%, 80%, 85%, 90%, 91%, 92%, 93%, 94%, 95%, 96%, 97%, 98%, 99%, or 100% identical to a polypeptide that begins at any one of amino acids of 370-386 of SEQ ID NO: 553, and ends at any one of amino acids 682-685 of SEQ ID NO: 553. In some embodiments, the betaglycan:BMPER heteromultimer comprises a single chain ligand trap that comprises a first BMPER polypeptide domain that is at least 70%, 75%, 80%, 85%, 90%, 91%, 92%, 93%, 94%, 95%, 96%, 97%, 98%, 99%, or 100% identical to a polypeptide that begins at any one of amino acids of 39-50 of SEQ ID NO: 553 and ends at any one of amino acids 364-369 of SEQ ID NO: 553, and second BMPER polypeptide domain that is at least 70%, 75%, 80%, 85%, 90%, 91%, 92%, 93%, 94%, 95%, 96%, 97%, 98%, 99%, or 100% identical to a polypeptide that begins at any one of amino acids of 370-386 of SEQ ID NO: 553 and ends at any one of amino acids 682-685 of SEQ ID NO: 553. In certain preferred embodiments, betaglycan:BMPER heteromultimers are soluble. In some embodiments, a betaglycan:BMPER heteromultimer of the disclosure binds to one or more TGF-beta superfamily ligands (e.g., binds to one or more TGF-beta superfamily ligands with a K_{D} of at least 1×10⁻⁷). In some embodiments, a betaglycan:BMPER heteromultimer of the disclosure inhibits one or more TGF-beta superfamily ligands (e.g., inhibits Smad signaling). Heteromultimer-ligand binding and inhibition may be determined using a variety of assays including, for example, those described herein (e.g., in vitro binding and/or cell-based signaling assays). In some embodiments, a betaglycan:BMPER heteromultimer of the disclosure has a different TGF-beta ligand binding and/or inhibition profile (specificity) compared to a corresponding homomultimer (e.g., betaglycan and BMPER homomultimers). In some embodiments, a betaglycan:BMPER heteromultimer of the disclosure is a heterodimer.

[0169] In certain aspects, the disclosure relates to heteromultimers that comprise at least one betaglycan polypeptide, which includes fragments, functional variants, and modified forms thereof, and at least one RGM-A polypeptide, which includes fragments, functional variants, and modified forms thereof. In some embodiments, the betaglycan:RGM-A heteromultimer comprises a polypeptide that is at least 70%, 75%, 80%, 85%, 90%, 91%, 92%, 93%, 94%, 95%, 95%, 96%, 97%, 98%, 99%, or 100% identical to the amino acid sequence of any one of SEQ ID NOs: 585, 586, 589, or 590. In some embodiments, the betaglycan:RGM-A heteromultimer comprises a polypeptide that is at least 70%, 75%, 80%, 85%, 90%, 91%, 92%, 93%, 94%, 95%, 95%, 96%, 97%, 98%, 99%, or 100% identical to a polypeptide that begins at any one of amino acids of 21-28 of SEQ ID NO: 585 and ends at any one of amino acids 381-787 of SEQ ID NO: 585. In some embodiments, the betaglycan:RGM-A heteromultimer comprises a polypeptide that is at least 70%, 75%, 80%, 85%, 90%, 91%, 92%, 93%, 94%, 95%, 95%, 96%, 97%, 98%, 99%, or 100% identical to a polypeptide that begins at any one of amino acids of 21-28 of SEQ ID NO: 589 and ends at any one of amino acids 380-786 of SEQ ID NO: 589. In some embodiments, the betaglycan:RGM-A heteromultimer comprises a polypeptide that is at least 70%, 75%, 80%, 85%, 90%, 91%, 92%, 93%, 94%, 95%, 95%, 96%, 97%, 98%, 99%, or 100% identical to the amino acid sequence of any one of SEQ ID NOs: 553 or 554. In some embodiments, the betaglycan:RGM-A heteromultimer comprises a polypeptide that is at least 70%, 75%, 80%, 85%, 90%, 91%, 92%, 93%, 94%, 95%, 95%, 96%, 97%, 98%, 99%, or 100% identical to a polypeptide that begins at any one of amino acids of 1-177 of SEQ ID NO: 561 and ends at any one of amino acids 430-458 of SEQ ID NO: 561. In some embodiments, the betaglycan:RGM-A heteromultimer comprises a polypeptide that is at least 70%, 75%, 80%, 85%, 90%, 91%, 92%, 93%, 94%, 95%, 95%, 96%, 97%, 98%, 99%, or 100% identical to a polypeptide that begins at any one of amino acids of 1-153 of SEQ ID NO: 565 and ends at any one of amino acids 406-434 of SEQ ID NO: 565. In some embodiments, the betaglycan:RGM-A heteromultimer comprises a polypeptide that is at least 70%, 75%, 80%, 85%, 90%, 91%, 92%, 93%, 94%, 95%, 95%, 96%, 97%, 98%, 99%, or 100% identical to a polypeptide that begins at any one of amino acids of 1-169 of SEQ ID NO: 569 and ends at any one of amino acids 422-450 of SEQ ID NO: 569. In certain preferred embodiments, betaglycan:RGM-A heteromultimers are soluble. In some embodiments, a betaglycan:RGM-A heteromultimer of the disclosure binds to one or more TGF-beta superfamily ligands (e.g., binds to one or more TGF-beta superfamily ligands with a K_{D} of at least 1×10⁻⁷). In some embodiments, a betaglycan:RGM-A heteromultimer of the disclosure inhibits one or more TGF-beta superfamily ligands (e.g., inhibits Smad signaling). Heteromultimer-ligand binding and inhibition may be determined using a variety of assays including, for example, those described herein (e.g., in vitro binding and/or cell-based signaling assays). In some embodiments, a betaglycan:RGM-A heteromultimer of the disclosure has a different TGF-beta ligand binding and/or inhibition profile (specificity) compared to a corresponding homomultimer (e.g., betaglycan and RGM-A homomultimers). In some embodiments, a betaglycan:RGM-A heteromultimer of the disclosure is a heterodimer.

[0170] In certain aspects, the disclosure relates to heteromultimers that comprise at least one betaglycan polypeptide, which includes fragments, functional variants, and modified forms thereof, and at least one RGM-B polypeptide, which includes fragments, functional variants, and modified forms thereof. In some embodiments, the betaglycan:RGM-B heteromultimer comprises a polypeptide that is at least 70%, 75%, 80%, 85%, 90%, 91%, 92%, 93%, 94%, 95%, 95%, 96%, 97%, 98%, 99%, or 100% identical to the amino acid sequence of any one of SEQ ID NOs: 585, 586, 589, or 590. In some embodiments, the betaglycan:RGM-B heteromultimer comprises a polypeptide that is at least 70%, 75%, 80%, 85%, 90%, 91%, 92%, 93%, 94%, 95%, 95%, 96%, 97%, 98%, 99%, or 100% identical to a polypeptide that begins at any one of amino acids of 21-28 of SEQ ID NO: 585 and ends at any one of amino acids 381-787 of SEQ ID NO: 585. In some embodiments, the betaglycan:RGM-B heteromultimer comprises a polypeptide that is at least 70%, 75%, 80%, 85%, 90%, 91%, 92%, 93%, 94%, 95%, 95%, 96%, 97%, 98%, 99%, or 100% identical to a polypeptide that begins at any one of amino acids of 21-28 of SEQ ID NO: 589 and ends at any one of amino acids 380-786 of SEQ ID NO: 589. In some embodiments, the betaglycan:RGM-B heteromultimer comprises a polypeptide that is at least 70%, 75%, 80%, 85%, 90%, 91%, 92%, 93%, 94%, 95%, 95%, 96%, 97%, 98%, 99%, or 100% identical to the amino acid sequence of any one of SEQ ID NOs: 557 or 558. In some embodiments, the betaglycan:RGM-B heteromultimer comprises a polypeptide that is at least 70%, 75%, 80%, 85%, 90%, 91%, 92%, 93%, 94%, 95%, 95%, 96%, 97%, 98%, 99%, or 100% identical to a polypeptide that begins at any one of amino acids of 1-87 of SEQ ID NO: 557 and ends at any one of amino acids 452-478 of SEQ ID NO: 557. In some embodiments, the betaglycan:RGM-B heteromultimer comprises a polypeptide that is at least 70%, 75%, 80%, 85%, 90%, 91%, 92%, 93%, 94%, 95%, 95%, 96%, 97%, 98%, 99%, or 100% identical to a polypeptide that begins at any one of amino acids of 210-222 of SEQ ID NO: 557 and ends at any one of amino acids 413-452 of SEQ ID NO: 557. In some embodiments, the betaglycan:RGM-B heteromultimer comprises a polypeptide that is at least 70%, 75%, 80%, 85%, 90%, 91%, 92%, 93%, 94%, 95%, 95%, 96%, 97%, 98%, 99%, or 100% identical to a polypeptide that begins at any one of amino acids of 87-95 of SEQ ID NO: 557 and ends at any one of amino acids 204-209 of SEQ ID NO: 557. In some embodiments, the betaglycan:RGM-B heteromultimer comprises a RGM-B protein, wherein the RGM-B protein is a dimer comprising a first polypeptide that is at least 70%, 75%, 80%, 85%, 90%, 91%, 92%, 93%, 94%, 95%, 96%, 97%, 98%, 99%, or 100% identical to a polypeptide that begins at any one of amino acids of 87-95 of SEQ ID NO: 557 and ends at any one of amino acids 204-209 of SEQ ID NO: 557 and second polypeptide that is at least 70%, 75%, 80%, 85%, 90%, 91%, 92%, 93%, 94%, 95%, 96%, 97%, 98%, 99%, or 100% identical to a polypeptide that begins at any one of amino acids of 210-222 of SEQ ID NO: 557 and ends at any one of amino acids 413-452 of SEQ ID NO: 557. In some embodiments, the betaglycan:RGM-B heteromultimer comprises a single chain ligand trap that comprises a first RGM-B polypeptide domain that is at least 70%, 75%, 80%, 85%, 90%, 91%, 92%, 93%, 94%, 95%, 96%, 97%, 98%, 99%, or 100% identical to a polypeptide that begins at any one of amino acids of 87-95 of SEQ ID NO: 557 and ends at any one of amino acids 204-209 of SEQ ID NO: 557 and second RGM-B polypeptide domain that is at least 70%, 75%, 80%, 85%, 90%, 91%, 92%, 93%, 94%, 95%, 96%, 97%, 98%, 99%, or 100% identical to a polypeptide that begins at any one of amino acids of 210-222 of SEQ ID NO: 557 and ends at any one of amino acids 413-452 of SEQ ID NO: 557. In certain preferred embodiments, betaglycan:RGM-B heteromultimers are soluble. In some embodiments, a betaglycan:RGM-B heteromultimer of the disclosure binds to one or more TGF-beta superfamily ligands (e.g., binds to one or more TGF-beta superfamily ligands with a K_{D} of at least 1×10⁻⁷). In some embodiments, a betaglycan:RGM-B heteromultimer of the disclosure inhibits one or more TGF-beta superfamily ligands (e.g., inhibits Smad signaling). Heteromultimer-ligand binding and inhibition may be determined using a variety of assays including, for example, those described herein (e.g., in vitro binding and/or cell-based signaling assays). In some embodiments, a betaglycan:RGM-B heteromultimer of the disclosure has a different TGF-beta ligand binding and/or inhibition profile (specificity) compared to a corresponding homomultimer (e.g., betaglycan and RGM-B homomultimers). In some embodiments, a betaglycan:RGM-B heteromultimer of the disclosure is a heterodimer.

[0171] In certain aspects, the disclosure relates to heteromultimers that comprise at least one betaglycan polypeptide, which includes fragments, functional variants, and modified forms thereof, and at least one hemojuvelin polypeptide, which includes fragments, functional variants, and modified forms thereof. In some embodiments, the betaglycan:hemojuvelin heteromultimer comprises a polypeptide that is at least 70%, 75%, 80%, 85%, 90%, 91%, 92%, 93%, 94%, 95%, 95%, 96%, 97%, 98%, 99%, or 100% identical to the amino acid sequence of any one of SEQ ID NOs: 585, 586, 589, or 590. In some embodiments, the betaglycan:hemojuvelin heteromultimer comprises a polypeptide that is at least 70%, 75%, 80%, 85%, 90%, 91%, 92%, 93%, 94%, 95%, 95%, 96%, 97%, 98%, 99%, or 100% identical to a polypeptide that begins at any one of amino acids of 21-28 of SEQ ID NO: 585 and ends at any one of amino acids 381-787 of SEQ ID NO: 585. In some embodiments, the betaglycan:hemojuvelin heteromultimer comprises a polypeptide that is at least 70%, 75%, 80%, 85%, 90%, 91%, 92%, 93%, 94%, 95%, 95%, 96%, 97%, 98%, 99%, or 100% identical to a polypeptide that begins at any one of amino acids of 21-28 of SEQ ID NO: 589 and ends at any one of amino acids 380-786 of SEQ ID NO: 589. In some embodiments, the betaglycan:hemojuvelin heteromultimer comprises a polypeptide that is at least 70%, 75%, 80%, 85%, 90%, 91%, 92%, 93%, 94%, 95%, 95%, 96%, 97%, 98%, 99%, or 100% identical to the amino acid sequence of any one of SEQ ID NOs: 573, 574, 577, 578, 581, or 582. In some embodiments, the betaglycan:hemojuvelin heteromultimer comprises a polypeptide that is at least 70%, 75%, 80%, 85%, 90%, 91%, 92%, 93%, 94%, 95%, 95%, 96%, 97%, 98%, 99%, or 100% identical to a polypeptide that begins at any one of amino acids of 1-36 of SEQ ID NO: 573 and ends at any one of amino acids 400-426 of SEQ ID NO: 573. In some embodiments, the betaglycan:hemojuvelin heteromultimer comprises a polypeptide that is at least 70%, 75%, 80%, 85%, 90%, 91%, 92%, 93%, 94%, 95%, 95%, 96%, 97%, 98%, 99%, or 100% identical to a polypeptide that begins at any one of amino acids of 36-42 of SEQ ID NO: 573 and ends at any one of amino acids 167-172 of SEQ ID NO: 573. In some embodiments, the betaglycan:hemojuvelin heteromultimer comprises a polypeptide that is at least 70%, 75%, 80%, 85%, 90%, 91%, 92%, 93%, 94%, 95%, 95%, 96%, 97%, 98%, 99%, or 100% identical to a polypeptide that begins at any one of amino acids of 173-185 of SEQ ID NO: 573 and ends at any one of amino acids 361-400 of SEQ ID NO: 573. In some embodiments, the betaglycan:hemojuvelin heteromultimer comprises a hemojuvelin protein that is a dimer comprising a first polypeptide that is at least 70%, 75%, 80%, 85%, 90%, 91%, 92%, 93%, 94%, 95%, 96%, 97%, 98%, 99%, or 100% identical to a polypeptide that begins at any one of amino acids of 36-42 of SEQ ID NO: 573, and ends at any one of amino acids 167-172 of SEQ ID NO: 573 and second polypeptide that is at least 70%, 75%, 80%, 85%, 90%, 91%, 92%, 93%, 94%, 95%, 96%, 97%, 98%, 99%, or 100% identical to a polypeptide that begins at any one of amino acids of 173-185 of SEQ ID NO: 573 and ends at any one of amino acids 361-400 of SEQ ID NO: 573. In some embodiments, the betaglycan:hemojuvelin heteromultimer comprises a single chain ligand trap that comprises a first hemojuvelin polypeptide domain that is at least 70%, 75%, 80%, 85%, 90%, 91%, 92%, 93%, 94%, 95%, 96%, 97%, 98%, 99%, or 100% identical to a polypeptide that begins at any one of amino acids of 36-42 of SEQ ID NO: 573 and ends at any one of amino acids 167-172 of SEQ ID NO: 573 and second hemojuvelin polypeptide domain that is at least 70%, 75%, 80%, 85%, 90%, 91%, 92%, 93%, 94%, 95%, 96%, 97%, 98%, 99%, or 100% identical to a polypeptide that begins at any one of amino acids of 173-185 of SEQ ID NO: 573 and ends at any one of amino acids 361-400 of SEQ ID NO: 573. In some embodiments, the betaglycan:hemojuvelin heteromultimer comprises a polypeptide that is at least 70%, 75%, 80%, 85%, 90%, 91%, 92%, 93%, 94%, 95%, 95%, 96%, 97%, 98%, 99%, or 100% identical to a polypeptide that begins at any one of amino acids of 1-6 of SEQ ID NO: 577 and ends at any one of amino acids 287-313 of SEQ ID NO: 577. In some embodiments, the betaglycan:hemojuvelin heteromultimer comprises a polypeptide that is at least 70%, 75%, 80%, 85%, 90%, 91%, 92%, 93%, 94%, 95%, 95%, 96%, 97%, 98%, 99%, or 100% identical to a polypeptide that begins at any one of amino acids of 1-6 of SEQ ID NO: 577 and ends at any one of amino acids 54-59 of SEQ ID NO: 577. In some embodiments, the betaglycan:hemojuvelin heteromultimer comprises a polypeptide that is at least 70%, 75%, 80%, 85%, 90%, 91%, 92%, 93%, 94%, 95%, 95%, 96%, 97%, 98%, 99%, or 100% identical to a polypeptide that begins at any one of amino acids of 60-72 of SEQ ID NO: 577 and ends at any one of amino acids 248-287 of SEQ ID NO: 577. In some embodiments, the betaglycan:hemojuvelin heteromultimer comprises a hemojuvelin protein, wherein the hemojuvelin protein is a dimer comprising a first polypeptide that is at least 70%, 75%, 80%, 85%, 90%, 91%, 92%, 93%, 94%, 95%, 96%, 97%, 98%, 99%, or 100% identical to a polypeptide that begins at any one of amino acids of 1-6 of SEQ ID NO: 577 and ends at any one of amino acids 54-59 of SEQ ID NO: 577, and second polypeptide that is at least 70%, 75%, 80%, 85%, 90%, 91%, 92%, 93%, 94%, 95%, 96%, 97%, 98%, 99%, or 100% identical to a polypeptide that begins at any one of amino acids of 60-72 of SEQ ID NO: 577 and ends at any one of amino acids 248-287 of SEQ ID NO: 577. In some embodiments, the betaglycan:hemojuvelin heteromultimer comprises a single chain ligand trap that comprises a first hemojuvelin polypeptide domain that is at least 70%, 75%, 80%, 85%, 90%, 91%, 92%, 93%, 94%, 95%, 96%, 97%, 98%, 99%, or 100% identical to a polypeptide that begins at any one of amino acids of 1-6 of SEQ ID NO: 577 and ends at any one of amino acids 54-59 of SEQ ID NO: 577, and second hemojuvelin polypeptide domain that is at least 70%, 75%, 80%, 85%, 90%, 91%, 92%, 93%, 94%, 95%, 96%, 97%, 98%, 99%, or 100% identical to a polypeptide that begins at any one of amino acids of 60-72 of SEQ ID NO: 577, and ends at any one of amino acids 248-287 of SEQ ID NO: 577. In some embodiments, the betaglycan:hemojuvelin heteromultimer comprises a polypeptide that is at least 70%, 75%, 80%, 85%, 90%, 91%, 92%, 93%, 94%, 95%, 95%, 96%, 97%, 98%, 99%, or 100% identical to a polypeptide that begins at any one of amino acids of 1-4 of SEQ ID NO: 581 and ends at any one of amino acids 135-200 of SEQ ID NO: 581. In certain preferred embodiments, betaglycan:hemojuvelin heteromultimers are soluble. In some embodiments, a betaglycan:hemojuvelin heteromultimer of the disclosure binds to one or more TGF-beta superfamily ligands (e.g., binds to one or more TGF-beta superfamily ligands with a K_{D} of at least 1×10⁻⁷). In some embodiments, a betaglycan:hemojuvelin heteromultimer of the disclosure inhibits one or more TGF-beta superfamily ligands (e.g., inhibits Smad signaling). Heteromultimer-ligand binding and inhibition may be determined using a variety of assays including, for example, those described herein (e.g., in vitro binding and/or cell-based signaling assays). In some embodiments, a betaglycan:hemojuvelin heteromultimer of the disclosure has a different TGF-beta ligand binding and/or inhibition profile (specificity) compared to a corresponding homomultimer (e.g., betaglycan and hemojuvelin homomultimers). In some embodiments, a betaglycan:hemojuvelin heteromultimer of the disclosure is a heterodimer.

[0172] In certain aspects, the disclosure relates to heteromultimers that comprise at least one Cripto-1 polypeptide, which includes fragments, functional variants, and modified forms thereof, and at least one Cryptic protein polypeptide, which includes fragments, functional variants, and modified forms thereof. In some embodiments, the Cripto-1:Cryptic protein heteromultimer comprises a polypeptide that is at least 70%, 75%, 80%, 85%, 90%, 91%, 92%, 93%, 94%, 95%, 95%, 96%, 97%, 98%, 99%, or 100% identical to the amino acid sequence of any one of SEQ ID NOs: 513, 514, 517, or 518. In some embodiments, the Cripto-1:Cryptic protein heteromultimer comprises a polypeptide that is at least 70%, 75%, 80%, 85%, 90%, 91%, 92%, 93%, 94%, 95%, 95%, 96%, 97%, 98%, 99%, or 100% identical to a polypeptide that begins at any one of amino acids of 31-82 of SEQ ID NO: 513 and ends at any one of amino acids 172-188 of SEQ ID NO: 513. In some embodiments, the Cripto-1:Cryptic protein heteromultimer comprises a polypeptide that is at least 70%, 75%, 80%, 85%, 90%, 91%, 92%, 93%, 94%, 95%, 95%, 96%, 97%, 98%, 99%, or 100% identical to a polypeptide that begins at any one of amino acids of 15-66 of SEQ ID NO: 517, and ends at any one of amino acids 156-172 of SEQ ID NO: 517. In some embodiments, the Cripto-1:Cryptic protein heteromultimer comprises a polypeptide that is at least 70%, 75%, 80%, 85%, 90%, 91%, 92%, 93%, 94%, 95%, 95%, 96%, 97%, 98%, 99%, or 100% identical to the amino acid sequence of any one of SEQ ID NOs: 521, 522, 525, 526, 529, or 530. In some embodiments, the Cripto-1:Cryptic protein heteromultimer comprises a polypeptide that is at least 70%, 75%, 80%, 85%, 90%, 91%, 92%, 93%, 94%, 95%, 95%, 96%, 97%, 98%, 99%, or 100% identical to a polypeptide that begins at any one of amino acids of 26-90 of SEQ ID NO: 521 and ends at any one of amino acids 157-233 of SEQ ID NO: 521. In some embodiments, the Cripto-1:Cryptic protein heteromultimer comprises a polypeptide that is at least 70%, 75%, 80%, 85%, 90%, 91%, 92%, 93%, 94%, 95%, 95%, 96%, 97%, 98%, 99%, or 100% identical to a polypeptide that begins at any one of amino acids of 26-30 of SEQ ID NO: 525 and ends at any one of amino acids 82-191 of SEQ ID NO: 525. In some embodiments, the Cripto-1:Cryptic protein heteromultimer comprises a polypeptide that is at least 70%, 75%, 80%, 85%, 90%, 91%, 92%, 93%, 94%, 95%, 95%, 96%, 97%, 98%, 99%, or 100% identical to a polypeptide that begins at any one of amino acids of 26-30 of SEQ ID NO: 529, and ends at any one of amino acids 82-148 of SEQ ID NO: 529. In certain preferred embodiments, Cripto-1:Cryptic protein heteromultimers are soluble. In some embodiments, a Cripto-1:Cryptic protein heteromultimer of the disclosure binds to one or more TGF-beta superfamily ligands (e.g., binds to one or more TGF-beta superfamily ligands with a K_{D} of at least 1×10⁻⁷). In some embodiments, a Cripto-1:Cryptic protein heteromultimer of the disclosure inhibits one or more TGF-beta superfamily ligands (e.g., inhibits Smad signaling). Heteromultimer-ligand binding and inhibition may be determined using a variety of assays including, for example, those described herein (e.g., in vitro binding and/or cell-based signaling assays). In some embodiments, a Cripto-1:Cryptic protein heteromultimer of the disclosure has a different TGF-beta ligand binding and/or inhibition profile (specificity) compared to a corresponding homomultimer (e.g., Cripto-1 and Cryptic protein homomultimers). In some embodiments, a Cripto-1:Cryptic protein heteromultimer of the disclosure is a heterodimer.

[0173] In certain aspects, the disclosure relates to heteromultimers that comprise at least one Cripto-1 polypeptide, which includes fragments, functional variants, and modified forms thereof, and at least one Cryptic family protein 1B polypeptide, which includes fragments, functional variants, and modified forms thereof. In some embodiments, the Cripto-1:Cryptic family protein 1B heteromultimer comprises a polypeptide that is at least 70%, 75%, 80%, 85%, 90%, 91%, 92%, 93%, 94%, 95%, 95%, 96%, 97%, 98%, 99%, or 100% identical to the amino acid sequence of any one of SEQ ID NOs: 513, 514, 517, or 518. In some embodiments, the Cripto-1:Cryptic family protein 1B heteromultimer comprises a polypeptide that is at least 70%, 75%, 80%, 85%, 90%, 91%, 92%, 93%, 94%, 95%, 95%, 96%, 97%, 98%, 99%, or 100% identical to a polypeptide that begins at any one of amino acids of 31-82 of SEQ ID NO: 513 and ends at any one of amino acids 172-188 of SEQ ID NO: 513. In some embodiments, the Cripto-1:Cryptic family protein 1B heteromultimer comprises a polypeptide that is at least 70%, 75%, 80%, 85%, 90%, 91%, 92%, 93%, 94%, 95%, 95%, 96%, 97%, 98%, 99%, or 100% identical to a polypeptide that begins at any one of amino acids of 15-66 of SEQ ID NO: 517, and ends at any one of amino acids 156-172 of SEQ ID NO: 517. In some embodiments, the Cripto-1:Cryptic family protein 1B heteromultimer comprises a polypeptide that is at least 70%, 75%, 80%, 85%, 90%, 91%, 92%, 93%, 94%, 95%, 95%, 96%, 97%, 98%, 99%, or 100% identical to the amino acid sequence of any one of SEQ ID NOs: 533 or 534. In some embodiments, the Cripto-1:Cryptic family protein 1B heteromultimer comprises a polypeptide that is at least 70%, 75%, 80%, 85%, 90%, 91%, 92%, 93%, 94%, 95%, 95%, 96%, 97%, 98%, 99%, or 100% identical to a polypeptide that begins at any one of amino acids of 26-30 of SEQ ID NO: 533 and ends at any one of amino acids 82-223 of SEQ ID NO: 533. In certain preferred embodiments, Cripto-1:Cryptic family protein 1B heteromultimers are soluble. In some embodiments, a Cripto-1:Cryptic family protein 1B heteromultimer of the disclosure binds to one or more TGF-beta superfamily ligands (e.g., binds to one or more TGF-beta superfamily ligands with a K_{D} of at least 1×10⁻⁷). In some embodiments, a Cripto-1:Cryptic family protein 1B heteromultimer of the disclosure inhibits one or more TGF-beta superfamily ligands (e.g., inhibits Smad signaling). Heteromultimer-ligand binding and inhibition may be determined using a variety of assays including, for example, those described herein (e.g., in vitro binding and/or cell-based signaling assays). In some embodiments, a Cripto-1:Cryptic family protein 1B heteromultimer of the disclosure has a different TGF-beta ligand binding and/or inhibition profile (specificity) compared to a corresponding homomultimer (e.g., Cripto-1 and Cryptic family protein 1B homomultimers). In some embodiments, a Cripto-1:Cryptic family protein 1B heteromultimer of the disclosure is a heterodimer.

[0174] In certain aspects, the disclosure relates to heteromultimers that comprise at least one Cripto-1 polypeptide, which includes fragments, functional variants, and modified forms thereof, and at least one Crim1 polypeptide, which includes fragments, functional variants, and modified forms thereof. In some embodiments, the Cripto-1:Crim1 heteromultimer comprises a polypeptide that is at least 70%, 75%, 80%, 85%, 90%, 91%, 92%, 93%, 94%, 95%, 95%, 96%, 97%, 98%, 99%, or 100% identical to the amino acid sequence of any one of SEQ ID NOs: 513, 514, 517, or 518. In some embodiments, the Cripto-1:Crim1 heteromultimer comprises a polypeptide that is at least 70%, 75%, 80%, 85%, 90%, 91%, 92%, 93%, 94%, 95%, 95%, 96%, 97%, 98%, 99%, or 100% identical to a polypeptide that begins at any one of amino acids of 31-82 of SEQ ID NO: 513 and ends at any one of amino acids 172-188 of SEQ ID NO: 513. In some embodiments, the Cripto-1:Crim1 heteromultimer comprises a polypeptide that is at least 70%, 75%, 80%, 85%, 90%, 91%, 92%, 93%, 94%, 95%, 95%, 96%, 97%, 98%, 99%, or 100% identical to a polypeptide that begins at any one of amino acids of 15-66 of SEQ ID NO: 517, and ends at any one of amino acids 156-172 of SEQ ID NO: 517. In some embodiments, the Cripto-1:Crim1 heteromultimer comprises a polypeptide that is at least 70%, 75%, 80%, 85%, 90%, 91%, 92%, 93%, 94%, 95%, 95%, 96%, 97%, 98%, 99%, or 100% identical to the amino acid sequence of any one of SEQ ID NOs: 537 or 538. In some embodiments, the Cripto-1:Crim1 heteromultimer comprises a polypeptide that is at least 70%, 75%, 80%, 85%, 90%, 91%, 92%, 93%, 94%, 95%, 95%, 96%, 97%, 98%, 99%, or 100% identical to a polypeptide that begins at any one of amino acids of 35-37 of SEQ ID NO: 537 and ends at any one of amino acids 873-939 of SEQ ID NO: 537. In certain preferred embodiments, Cripto-1:Crim1 heteromultimers are soluble. In some embodiments, a Cripto-1:Crim1 heteromultimer of the disclosure binds to one or more TGF-beta superfamily ligands (e.g., binds to one or more TGF-beta superfamily ligands with a K_{D} of at least 1×10⁻⁷). In some embodiments, a Cripto-1:Crim1 heteromultimer of the disclosure inhibits one or more TGF-beta superfamily ligands (e.g., inhibits Smad signaling). Heteromultimer-ligand binding and inhibition may be determined using a variety of assays including, for example, those described herein (e.g., in vitro binding and/or cell-based signaling assays). In some embodiments, a Cripto-1:Crim1 heteromultimer of the disclosure has a different TGF-beta ligand binding and/or inhibition profile (specificity) compared to a corresponding homomultimer (e.g., Cripto-1 and Crim1 homomultimers). In some embodiments, a Cripto-1:Crim1 heteromultimer of the disclosure is a heterodimer.

[0175] In certain aspects, the disclosure relates to heteromultimers that comprise at least one Cripto-1 polypeptide, which includes fragments, functional variants, and modified forms thereof, and at least one Crim2 polypeptide, which includes fragments, functional variants, and modified forms thereof. In some embodiments, the Cripto-1:Crim2 heteromultimer comprises a polypeptide that is at least 70%, 75%, 80%, 85%, 90%, 91%, 92%, 93%, 94%, 95%, 95%, 96%, 97%, 98%, 99%, or 100% identical to the amino acid sequence of any one of SEQ ID NOs: 513, 514, 517, or 518. In some embodiments, the Cripto-1:Crim2 heteromultimer comprises a polypeptide that is at least 70%, 75%, 80%, 85%, 90%, 91%, 92%, 93%, 94%, 95%, 95%, 96%, 97%, 98%, 99%, or 100% identical to a polypeptide that begins at any one of amino acids of 31-82 of SEQ ID NO: 513 and ends at any one of amino acids 172-188 of SEQ ID NO: 513. In some embodiments, the Cripto-1:Crim2 heteromultimer comprises a polypeptide that is at least 70%, 75%, 80%, 85%, 90%, 91%, 92%, 93%, 94%, 95%, 95%, 96%, 97%, 98%, 99%, or 100% identical to a polypeptide that begins at any one of amino acids of 15-66 of SEQ ID NO: 517, and ends at any one of amino acids 156-172 of SEQ ID NO: 517. In some embodiments, the Cripto-1:Crim2 heteromultimer comprises a polypeptide that is at least 70%, 75%, 80%, 85%, 90%, 91%, 92%, 93%, 94%, 95%, 95%, 96%, 97%, 98%, 99%, or 100% identical to the amino acid sequence of any one of SEQ ID NOs: 541, 542, 545, or 546. In some embodiments, the Cripto-1:Crim2 heteromultimer comprises a polypeptide that is at least 70%, 75%, 80%, 85%, 90%, 91%, 92%, 93%, 94%, 95%, 95%, 96%, 97%, 98%, 99%, or 100% identical to a polypeptide that begins at any one of amino acids of 26-138 of SEQ ID NO: 541 and ends at any one of amino acids 1298-1503 of SEQ ID NO: 541. In some embodiments, the Cripto-1:Crim2 heteromultimer comprises a polypeptide that is at least 70%, 75%, 80%, 85%, 90%, 91%, 92%, 93%, 94%, 95%, 95%, 96%, 97%, 98%, 99%, or 100% identical to a polypeptide that begins at any one of amino acids of 24-138 of SEQ ID NO: 545 and ends at any one of amino acids 539-814 of SEQ ID NO: 545. In certain preferred embodiments, Cripto-1:Crim2 heteromultimers are soluble. In some embodiments, a Cripto-1:Crim2 heteromultimer of the disclosure binds to one or more TGF-beta superfamily ligands (e.g., binds to one or more TGF-beta superfamily ligands with a K_{D} of at least 1×10⁻⁷). In some embodiments, a Cripto-1:Crim2 heteromultimer of the disclosure inhibits one or more TGF-beta superfamily ligands (e.g., inhibits Smad signaling). Heteromultimer-ligand binding and inhibition may be determined using a variety of assays including, for example, those described herein (e.g., in vitro binding and/or cell-based signaling assays). In some embodiments, a Cripto-1:Crim2 heteromultimer of the disclosure has a different TGF-beta ligand binding and/or inhibition profile (specificity) compared to a corresponding homomultimer (e.g., Cripto-1 and Crim2 homomultimers). In some embodiments, a Cripto-1:Crim2 heteromultimer of the disclosure is a heterodimer.

[0176] In certain aspects, the disclosure relates to heteromultimers that comprise at least one Cripto-1 polypeptide, which includes fragments, functional variants, and modified forms thereof, and at least one BAMBI polypeptide, which includes fragments, functional variants, and modified forms thereof. In some embodiments, the Cripto-1:BAMBI heteromultimer comprises a polypeptide that is at least 70%, 75%, 80%, 85%, 90%, 91%, 92%, 93%, 94%, 95%, 95%, 96%, 97%, 98%, 99%, or 100% identical to the amino acid sequence of any one of SEQ ID NOs: 513, 514, 517, or 518. In some embodiments, the Cripto-1:BAMBI heteromultimer comprises a polypeptide that is at least 70%, 75%, 80%, 85%, 90%, 91%, 92%, 93%, 94%, 95%, 95%, 96%, 97%, 98%, 99%, or 100% identical to a polypeptide that begins at any one of amino acids of 31-82 of SEQ ID NO: 513 and ends at any one of amino acids 172-188 of SEQ ID NO: 513. In some embodiments, the Cripto-1:BAMBI heteromultimer comprises a polypeptide that is at least 70%, 75%, 80%, 85%, 90%, 91%, 92%, 93%, 94%, 95%, 95%, 96%, 97%, 98%, 99%, or 100% identical to a polypeptide that begins at any one of amino acids of 15-66 of SEQ ID NO: 517, and ends at any one of amino acids 156-172 of SEQ ID NO: 517. In some embodiments, the Cripto-1:BAMBI heteromultimer comprises a polypeptide that is at least 70%, 75%, 80%, 85%, 90%, 91%, 92%, 93%, 94%, 95%, 95%, 96%, 97%, 98%, 99%, or 100% identical to the amino acid sequence of any one of SEQ ID NOs: 549 or 550. In some embodiments, the Cripto-1:BAMBI heteromultimer comprises a polypeptide that is at least 70%, 75%, 80%, 85%, 90%, 91%, 92%, 93%, 94%, 95%, 95%, 96%, 97%, 98%, 99%, or 100% identical to a polypeptide that begins at any one of amino acids of 21-30 of SEQ ID NO: 549 and ends at any one of amino acids 104-152 of SEQ ID NO: 549. In certain preferred embodiments, Cripto-1:BAMBI heteromultimers are soluble. In some embodiments, a Cripto-1:BAMBI heteromultimer of the disclosure binds to one or more TGF-beta superfamily ligands (e.g., binds to one or more TGF-beta superfamily ligands with a K_{D} of at least 1×10⁻⁷). In some embodiments, a Cripto-1:BAMBI heteromultimer of the disclosure inhibits one or more TGF-beta superfamily ligands (e.g., inhibits Smad signaling). Heteromultimer-ligand binding and inhibition may be determined using a variety of assays including, for example, those described herein (e.g., in vitro binding and/or cell-based signaling assays). In some embodiments, a Cripto-1:BAMBI heteromultimer of the disclosure has a different TGF-beta ligand binding and/or inhibition profile (specificity) compared to a corresponding homomultimer (e.g., Cripto-1 and BAMBI homomultimers). In some embodiments, a Cripto-1:BAMBI heteromultimer of the disclosure is a heterodimer.

[0177] In certain aspects, the disclosure relates to heteromultimers that comprise at least one Cripto-1 polypeptide, which includes fragments, functional variants, and modified forms thereof, and at least one BMPER polypeptide, which includes fragments, functional variants, and modified forms thereof. In some embodiments, the Cripto-1:BMPER heteromultimer comprises a polypeptide that is at least 70%, 75%, 80%, 85%, 90%, 91%, 92%, 93%, 94%, 95%, 95%, 96%, 97%, 98%, 99%, or 100% identical to the amino acid sequence of any one of SEQ ID NOs: 513, 514, 517, or 518. In some embodiments, the Cripto-1:BMPER heteromultimer comprises a polypeptide that is at least 70%, 75%, 80%, 85%, 90%, 91%, 92%, 93%, 94%, 95%, 95%, 96%, 97%, 98%, 99%, or 100% identical to a polypeptide that begins at any one of amino acids of 31-82 of SEQ ID NO: 513 and ends at any one of amino acids 172-188 of SEQ ID NO: 513. In some embodiments, the Cripto-1:BMPER heteromultimer comprises a polypeptide that is at least 70%, 75%, 80%, 85%, 90%, 91%, 92%, 93%, 94%, 95%, 95%, 96%, 97%, 98%, 99%, or 100% identical to a polypeptide that begins at any one of amino acids of 15-66 of SEQ ID NO: 517, and ends at any one of amino acids 156-172 of SEQ ID NO: 517. In some embodiments, the Cripto-1:BMPER heteromultimer comprises a polypeptide that is at least 70%, 75%, 80%, 85%, 90%, 91%, 92%, 93%, 94%, 95%, 95%, 96%, 97%, 98%, 99%, or 100% identical to the amino acid sequence of any one of SEQ ID NOs: 553 or 554. In some embodiments, the Cripto-1:BMPER heteromultimer comprises a polypeptide that is at least 70%, 75%, 80%, 85%, 90%, 91%, 92%, 93%, 94%, 95%, 95%, 96%, 97%, 98%, 99%, or 100% identical to a polypeptide that begins at any one of amino acids of 39-50 of SEQ ID NO: 553 and ends at any one of amino acids 364-369 of SEQ ID NO: 553. In some embodiments, the Cripto-1:BMPER heteromultimer comprises a polypeptide that is at least 70%, 75%, 80%, 85%, 90%, 91%, 92%, 93%, 94%, 95%, 95%, 96%, 97%, 98%, 99%, or 100% identical to a polypeptide that begins at any one of amino acids of 370-386 of SEQ ID NO: 553 and ends at any one of amino acids 682-685 of SEQ ID NO: 553. In some embodiments, the Cripto-1:BMPER heteromultimer comprises a polypeptide that is at least 70%, 75%, 80%, 85%, 90%, 91%, 92%, 93%, 94%, 95%, 95%, 96%, 97%, 98%, 99%, or 100% identical to a polypeptide that begins at any one of amino acids of 39-50 of SEQ ID NO: 553 and ends at any one of amino acids 682-685 of SEQ ID NO: 553. In some embodiments, the Cripto-1:BMPER heteromultimer comprises a BMPER protein, wherein the BMPER protein is a dimer comprising a first polypeptide that is at least 70%, 75%, 80%, 85%, 90%, 91%, 92%, 93%, 94%, 95%, 96%, 97%, 98%, 99%, or 100% identical to a polypeptide that begins at any one of amino acids of 39-50 of SEQ ID NO: 553 and ends at any one of amino acids 364-369 of SEQ ID NO: 553, and second polypeptide that is at least 70%, 75%, 80%, 85%, 90%, 91%, 92%, 93%, 94%, 95%, 96%, 97%, 98%, 99%, or 100% identical to a polypeptide that begins at any one of amino acids of 370-386 of SEQ ID NO: 553, and ends at any one of amino acids 682-685 of SEQ ID NO: 553. In some embodiments, the Cripto-1:BMPER heteromultimer comprises a single chain ligand trap that comprises a first BMPER polypeptide domain that is at least 70%, 75%, 80%, 85%, 90%, 91%, 92%, 93%, 94%, 95%, 96%, 97%, 98%, 99%, or 100% identical to a polypeptide that begins at any one of amino acids of 39-50 of SEQ ID NO: 553 and ends at any one of amino acids 364-369 of SEQ ID NO: 553, and second BMPER polypeptide domain that is at least 70%, 75%, 80%, 85%, 90%, 91%, 92%, 93%, 94%, 95%, 96%, 97%, 98%, 99%, or 100% identical to a polypeptide that begins at any one of amino acids of 370-386 of SEQ ID NO: 553 and ends at any one of amino acids 682-685 of SEQ ID NO: 553. In certain preferred embodiments, Cripto-1:BMPER heteromultimers are soluble. In some embodiments, a Cripto-1:BMPER heteromultimer of the disclosure binds to one or more TGF-beta superfamily ligands (e.g., binds to one or more TGF-beta superfamily ligands with a K_{D} of at least 1×10⁻⁷). In some embodiments, a Cripto-1:BMPER heteromultimer of the disclosure inhibits one or more TGF-beta superfamily ligands (e.g., inhibits Smad signaling). Heteromultimer-ligand binding and inhibition may be determined using a variety of assays including, for example, those described herein (e.g., in vitro binding and/or cell-based signaling assays). In some embodiments, a Cripto-1:BMPER heteromultimer of the disclosure has a different TGF-beta ligand binding and/or inhibition profile (specificity) compared to a corresponding homomultimer (e.g., Cripto-1 and BMPER homomultimers). In some embodiments, a Cripto-1:BMPER heteromultimer of the disclosure is a heterodimer.

[0178] In certain aspects, the disclosure relates to heteromultimers that comprise at least one Cripto-1 polypeptide, which includes fragments, functional variants, and modified forms thereof, and at least one RGM-A polypeptide, which includes fragments, functional variants, and modified forms thereof. In some embodiments, the Cripto-1:RGM-A heteromultimer comprises a polypeptide that is at least 70%, 75%, 80%, 85%, 90%, 91%, 92%, 93%, 94%, 95%, 95%, 96%, 97%, 98%, 99%, or 100% identical to the amino acid sequence of any one of SEQ ID NOs: 513, 514, 517, or 518. In some embodiments, the Cripto-1:RGM-A heteromultimer comprises a polypeptide that is at least 70%, 75%, 80%, 85%, 90%, 91%, 92%, 93%, 94%, 95%, 95%, 96%, 97%, 98%, 99%, or 100% identical to a polypeptide that begins at any one of amino acids of 31-82 of SEQ ID NO: 513 and ends at any one of amino acids 172-188 of SEQ ID NO: 513. In some embodiments, the Cripto-1:RGM-A heteromultimer comprises a polypeptide that is at least 70%, 75%, 80%, 85%, 90%, 91%, 92%, 93%, 94%, 95%, 95%, 96%, 97%, 98%, 99%, or 100% identical to a polypeptide that begins at any one of amino acids of 15-66 of SEQ ID NO: 517, and ends at any one of amino acids 156-172 of SEQ ID NO: 517. In some embodiments, the Cripto-1:RGM-A heteromultimer comprises a polypeptide that is at least 70%, 75%, 80%, 85%, 90%, 91%, 92%, 93%, 94%, 95%, 95%, 96%, 97%, 98%, 99%, or 100% identical to the amino acid sequence of any one of SEQ ID NOs: 553 or 554. In some embodiments, the Cripto-1:RGM-A heteromultimer comprises a polypeptide that is at least 70%, 75%, 80%, 85%, 90%, 91%, 92%, 93%, 94%, 95%, 95%, 96%, 97%, 98%, 99%, or 100% identical to a polypeptide that begins at any one of amino acids of 1-177 of SEQ ID NO: 561 and ends at any one of amino acids 430-458 of SEQ ID NO: 561. In some embodiments, the Cripto-1:RGM-A heteromultimer comprises a polypeptide that is at least 70%, 75%, 80%, 85%, 90%, 91%, 92%, 93%, 94%, 95%, 95%, 96%, 97%, 98%, 99%, or 100% identical to a polypeptide that begins at any one of amino acids of 1-153 of SEQ ID NO: 565 and ends at any one of amino acids 406-434 of SEQ ID NO: 565. In some embodiments, the Cripto-1:RGM-A heteromultimer comprises a polypeptide that is at least 70%, 75%, 80%, 85%, 90%, 91%, 92%, 93%, 94%, 95%, 95%, 96%, 97%, 98%, 99%, or 100% identical to a polypeptide that begins at any one of amino acids of 1-169 of SEQ ID NO: 569 and ends at any one of amino acids 422-450 of SEQ ID NO: 569. In certain preferred embodiments, Cripto-1:RGM-A heteromultimers are soluble. In some embodiments, a Cripto-1:RGM-A heteromultimer of the disclosure binds to one or more TGF-beta superfamily ligands (e.g., binds to one or more TGF-beta superfamily ligands with a K_{D} of at least 1×10⁻⁷). In some embodiments, a Cripto-1:RGM-A heteromultimer of the disclosure inhibits one or more TGF-beta superfamily ligands (e.g., inhibits Smad signaling). Heteromultimer-ligand binding and inhibition may be determined using a variety of assays including, for example, those described herein (e.g., in vitro binding and/or cell-based signaling assays). In some embodiments, a Cripto-1:RGM-A heteromultimer of the disclosure has a different TGF-beta ligand binding and/or inhibition profile (specificity) compared to a corresponding homomultimer (e.g., Cripto-1 and RGM-A homomultimers). In some embodiments, a Cripto-1:RGM-A heteromultimer of the disclosure is a heterodimer.

[0179] In certain aspects, the disclosure relates to heteromultimers that comprise at least one Cripto-1 polypeptide, which includes fragments, functional variants, and modified forms thereof, and at least one RGM-B polypeptide, which includes fragments, functional variants, and modified forms thereof. In some embodiments, the Cripto-1:RGM-B heteromultimer comprises a polypeptide that is at least 70%, 75%, 80%, 85%, 90%, 91%, 92%, 93%, 94%, 95%, 95%, 96%, 97%, 98%, 99%, or 100% identical to the amino acid sequence of any one of SEQ ID NOs: 513, 514, 517, or 518. In some embodiments, the Cripto-1:RGM-B heteromultimer comprises a polypeptide that is at least 70%, 75%, 80%, 85%, 90%, 91%, 92%, 93%, 94%, 95%, 95%, 96%, 97%, 98%, 99%, or 100% identical to a polypeptide that begins at any one of amino acids of 31-82 of SEQ ID NO: 513 and ends at any one of amino acids 172-188 of SEQ ID NO: 513. In some embodiments, the Cripto-1:RGM-B heteromultimer comprises a polypeptide that is at least 70%, 75%, 80%, 85%, 90%, 91%, 92%, 93%, 94%, 95%, 95%, 96%, 97%, 98%, 99%, or 100% identical to a polypeptide that begins at any one of amino acids of 15-66 of SEQ ID NO: 517, and ends at any one of amino acids 156-172 of SEQ ID NO: 517. In some embodiments, the Cripto-1:RGM-B heteromultimer comprises a polypeptide that is at least 70%, 75%, 80%, 85%, 90%, 91%, 92%, 93%, 94%, 95%, 95%, 96%, 97%, 98%, 99%, or 100% identical to the amino acid sequence of any one of SEQ ID NOs: 557 or 558. In some embodiments, the Cripto-1:RGM-B heteromultimer comprises a polypeptide that is at least 70%, 75%, 80%, 85%, 90%, 91%, 92%, 93%, 94%, 95%, 95%, 96%, 97%, 98%, 99%, or 100% identical to a polypeptide that begins at any one of amino acids of 1-87 of SEQ ID NO: 557 and ends at any one of amino acids 452-478 of SEQ ID NO: 557. In some embodiments, the Cripto-1:RGM-B heteromultimer comprises a polypeptide that is at least 70%, 75%, 80%, 85%, 90%, 91%, 92%, 93%, 94%, 95%, 95%, 96%, 97%, 98%, 99%, or 100% identical to a polypeptide that begins at any one of amino acids of 210-222 of SEQ ID NO: 557 and ends at any one of amino acids 413-452 of SEQ ID NO: 557. In some embodiments, the Cripto-1:RGM-B heteromultimer comprises a polypeptide that is at least 70%, 75%, 80%, 85%, 90%, 91%, 92%, 93%, 94%, 95%, 95%, 96%, 97%, 98%, 99%, or 100% identical to a polypeptide that begins at any one of amino acids of 87-95 of SEQ ID NO: 557 and ends at any one of amino acids 204-209 of SEQ ID NO: 557. In some embodiments, the Cripto-1:RGM-B heteromultimer comprises a RGM-B protein, wherein the RGM-B protein is a dimer comprising a first polypeptide that is at least 70%, 75%, 80%, 85%, 90%, 91%, 92%, 93%, 94%, 95%, 96%, 97%, 98%, 99%, or 100% identical to a polypeptide that begins at any one of amino acids of 87-95 of SEQ ID NO: 557 and ends at any one of amino acids 204-209 of SEQ ID NO: 557 and second polypeptide that is at least 70%, 75%, 80%, 85%, 90%, 91%, 92%, 93%, 94%, 95%, 96%, 97%, 98%, 99%, or 100% identical to a polypeptide that begins at any one of amino acids of 210-222 of SEQ ID NO: 557 and ends at any one of amino acids 413-452 of SEQ ID NO: 557. In some embodiments, the Cripto-1:RGM-B heteromultimer comprises a single chain ligand trap that comprises a first RGM-B polypeptide domain that is at least 70%, 75%, 80%, 85%, 90%, 91%, 92%, 93%, 94%, 95%, 96%, 97%, 98%, 99%, or 100% identical to a polypeptide that begins at any one of amino acids of 87-95 of SEQ ID NO: 557 and ends at any one of amino acids 204-209 of SEQ ID NO: 557 and second RGM-B polypeptide domain that is at least 70%, 75%, 80%, 85%, 90%, 91%, 92%, 93%, 94%, 95%, 96%, 97%, 98%, 99%, or 100% identical to a polypeptide that begins at any one of amino acids of 210-222 of SEQ ID NO: 557 and ends at any one of amino acids 413-452 of SEQ ID NO: 557. In certain preferred embodiments, Cripto-1:RGM-B heteromultimers are soluble. In some embodiments, a Cripto-1:RGM-B heteromultimer of the disclosure binds to one or more TGF-beta superfamily ligands (e.g., binds to one or more TGF-beta superfamily ligands with a K_{D} of at least 1×10⁻⁷). In some embodiments, a Cripto-1:RGM-B heteromultimer of the disclosure inhibits one or more TGF-beta superfamily ligands (e.g., inhibits Smad signaling). Heteromultimer-ligand binding and inhibition may be determined using a variety of assays including, for example, those described herein (e.g., in vitro binding and/or cell-based signaling assays). In some embodiments, a Cripto-1:RGM-B heteromultimer of the disclosure has a different TGF-beta ligand binding and/or inhibition profile (specificity) compared to a corresponding homomultimer (e.g., Cripto-1 and RGM-B homomultimers). In some embodiments, a Cripto-1:RGM-B heteromultimer of the disclosure is a heterodimer.

[0180] In certain aspects, the disclosure relates to heteromultimers that comprise at least one Cripto-1 polypeptide, which includes fragments, functional variants, and modified forms thereof, and at least one hemojuvelin polypeptide, which includes fragments, functional variants, and modified forms thereof. In some embodiments, the Cripto-1:hemojuvelin heteromultimer comprises a polypeptide that is at least 70%, 75%, 80%, 85%, 90%, 91%, 92%, 93%, 94%, 95%, 95%, 96%, 97%, 98%, 99%, or 100% identical to the amino acid sequence of any one of SEQ ID NOs: 513, 514, 517, or 518. In some embodiments, the Cripto-1:hemojuvelin heteromultimer comprises a polypeptide that is at least 70%, 75%, 80%, 85%, 90%, 91%, 92%, 93%, 94%, 95%, 95%, 96%, 97%, 98%, 99%, or 100% identical to a polypeptide that begins at any one of amino acids of 31-82 of SEQ ID NO: 513 and ends at any one of amino acids 172-188 of SEQ ID NO: 513. In some embodiments, the Cripto-1:hemojuvelin heteromultimer comprises a polypeptide that is at least 70%, 75%, 80%, 85%, 90%, 91%, 92%, 93%, 94%, 95%, 95%, 96%, 97%, 98%, 99%, or 100% identical to a polypeptide that begins at any one of amino acids of 15-66 of SEQ ID NO: 517, and ends at any one of amino acids 156-172 of SEQ ID NO: 517. In some embodiments, the Cripto-1:hemojuvelin heteromultimer comprises a polypeptide that is at least 70%, 75%, 80%, 85%, 90%, 91%, 92%, 93%, 94%, 95%, 95%, 96%, 97%, 98%, 99%, or 100% identical to the amino acid sequence of any one of SEQ ID NOs: 573, 574, 577, 578, 581, or 582. In some embodiments, the Cripto-1:hemojuvelin heteromultimer comprises a polypeptide that is at least 70%, 75%, 80%, 85%, 90%, 91%, 92%, 93%, 94%, 95%, 95%, 96%, 97%, 98%, 99%, or 100% identical to a polypeptide that begins at any one of amino acids of 1-36 of SEQ ID NO: 573 and ends at any one of amino acids 400-426 of SEQ ID NO: 573. In some embodiments, the Cripto-1:hemojuvelin heteromultimer comprises a polypeptide that is at least 70%, 75%, 80%, 85%, 90%, 91%, 92%, 93%, 94%, 95%, 95%, 96%, 97%, 98%, 99%, or 100% identical to a polypeptide that begins at any one of amino acids of 36-42 of SEQ ID NO: 573 and ends at any one of amino acids 167-172 of SEQ ID NO: 573. In some embodiments, the Cripto-1:hemojuvelin heteromultimer comprises a polypeptide that is at least 70%, 75%, 80%, 85%, 90%, 91%, 92%, 93%, 94%, 95%, 95%, 96%, 97%, 98%, 99%, or 100% identical to a polypeptide that begins at any one of amino acids of 173-185 of SEQ ID NO: 573 and ends at any one of amino acids 361-400 of SEQ ID NO: 573. In some embodiments, the Cripto-1:hemojuvelin heteromultimer comprises a hemojuvelin protein that is a dimer comprising a first polypeptide that is at least 70%, 75%, 80%, 85%, 90%, 91%, 92%, 93%, 94%, 95%, 96%, 97%, 98%, 99%, or 100% identical to a polypeptide that begins at any one of amino acids of 36-42 of SEQ ID NO: 573, and ends at any one of amino acids 167-172 of SEQ ID NO: 573 and second polypeptide that is at least 70%, 75%, 80%, 85%, 90%, 91%, 92%, 93%, 94%, 95%, 96%, 97%, 98%, 99%, or 100% identical to a polypeptide that begins at any one of amino acids of 173-185 of SEQ ID NO: 573 and ends at any one of amino acids 361-400 of SEQ ID NO: 573. In some embodiments, the Cripto-1:hemojuvelin heteromultimer comprises a single chain ligand trap that comprises a first hemojuvelin polypeptide domain that is at least 70%, 75%, 80%, 85%, 90%, 91%, 92%, 93%, 94%, 95%, 96%, 97%, 98%, 99%, or 100% identical to a polypeptide that begins at any one of amino acids of 36-42 of SEQ ID NO: 573 and ends at any one of amino acids 167-172 of SEQ ID NO: 573 and second hemojuvelin polypeptide domain that is at least 70%, 75%, 80%, 85%, 90%, 91%, 92%, 93%, 94%, 95%, 96%, 97%, 98%, 99%, or 100% identical to a polypeptide that begins at any one of amino acids of 173-185 of SEQ ID NO: 573 and ends at any one of amino acids 361-400 of SEQ ID NO: 573. In some embodiments, the Cripto-1:hemojuvelin heteromultimer comprises a polypeptide that is at least 70%, 75%, 80%, 85%, 90%, 91%, 92%, 93%, 94%, 95%, 95%, 96%, 97%, 98%, 99%, or 100% identical to a polypeptide that begins at any one of amino acids of 1-6 of SEQ ID NO: 577 and ends at any one of amino acids 287-313 of SEQ ID NO: 577. In some embodiments, the Cripto-1:hemojuvelin heteromultimer comprises a polypeptide that is at least 70%, 75%, 80%, 85%, 90%, 91%, 92%, 93%, 94%, 95%, 95%, 96%, 97%, 98%, 99%, or 100% identical to a polypeptide that begins at any one of amino acids of 1-6 of SEQ ID NO: 577 and ends at any one of amino acids 54-59 of SEQ ID NO: 577. In some embodiments, the Cripto-1:hemojuvelin heteromultimer comprises a polypeptide that is at least 70%, 75%, 80%, 85%, 90%, 91%, 92%, 93%, 94%, 95%, 95%, 96%, 97%, 98%, 99%, or 100% identical to a polypeptide that begins at any one of amino acids of 60-72 of SEQ ID NO: 577 and ends at any one of amino acids 248-287 of SEQ ID NO: 577. In some embodiments, the Cripto-1:hemojuvelin heteromultimer comprises a hemojuvelin protein, wherein the hemojuvelin protein is a dimer comprising a first polypeptide that is at least 70%, 75%, 80%, 85%, 90%, 91%, 92%, 93%, 94%, 95%, 96%, 97%, 98%, 99%, or 100% identical to a polypeptide that begins at any one of amino acids of 1-6 of SEQ ID NO: 577 and ends at any one of amino acids 54-59 of SEQ ID NO: 577, and second polypeptide that is at least 70%, 75%, 80%, 85%, 90%, 91%, 92%, 93%, 94%, 95%, 96%, 97%, 98%, 99%, or 100% identical to a polypeptide that begins at any one of amino acids of 60-72 of SEQ ID NO: 577 and ends at any one of amino acids 248-287 of SEQ ID NO: 577. In some embodiments, the Cripto-1:hemojuvelin heteromultimer comprises a single chain ligand trap that comprises a first hemojuvelin polypeptide domain that is at least 70%, 75%, 80%, 85%, 90%, 91%, 92%, 93%, 94%, 95%, 96%, 97%, 98%, 99%, or 100% identical to a polypeptide that begins at any one of amino acids of 1-6 of SEQ ID NO: 577 and ends at any one of amino acids 54-59 of SEQ ID NO: 577, and second hemojuvelin polypeptide domain that is at least 70%, 75%, 80%, 85%, 90%, 91%, 92%, 93%, 94%, 95%, 96%, 97%, 98%, 99%, or 100% identical to a polypeptide that begins at any one of amino acids of 60-72 of SEQ ID NO: 577, and ends at any one of amino acids 248-287 of SEQ ID NO: 577. In some embodiments, the Cripto-1:hemojuvelin heteromultimer comprises a polypeptide that is at least 70%, 75%, 80%, 85%, 90%, 91%, 92%, 93%, 94%, 95%, 95%, 96%, 97%, 98%, 99%, or 100% identical to a polypeptide that begins at any one of amino acids of 1-4 of SEQ ID NO: 581 and ends at any one of amino acids 135-200 of SEQ ID NO: 581. In certain preferred embodiments, Cripto-1:hemojuvelin heteromultimers are soluble. In some embodiments, a Cripto-1:hemojuvelin heteromultimer of the disclosure binds to one or more TGF-beta superfamily ligands (e.g., binds to one or more TGF-beta superfamily ligands with a K_{D} of at least 1×10⁻⁷). In some embodiments, a Cripto-1:hemojuvelin heteromultimer of the disclosure inhibits one or more TGF-beta superfamily ligands (e.g., inhibits Smad signaling). Heteromultimer-ligand binding and inhibition may be determined using a variety of assays including, for example, those described herein (e.g., in vitro binding and/or cell-based signaling assays). In some embodiments, a Cripto-1:hemojuvelin heteromultimer of the disclosure has a different TGF-beta ligand binding and/or inhibition profile (specificity) compared to a corresponding homomultimer (e.g., Cripto-1 and hemojuvelin homomultimers). In some embodiments, a Cripto-1:hemojuvelin heteromultimer of the disclosure is a heterodimer.

[0181] In certain aspects, the disclosure relates to heteromultimers that comprise at least one Cryptic protein polypeptide, which includes fragments, functional variants, and modified forms thereof, and at least one Cryptic family protein 1B polypeptide, which includes fragments, functional variants, and modified forms thereof. In some embodiments, the Cryptic protein:Cryptic family protein 1B heteromultimer comprises a polypeptide that is at least 70%, 75%, 80%, 85%, 90%, 91%, 92%, 93%, 94%, 95%, 95%, 96%, 97%, 98%, 99%, or 100% identical to the amino acid sequence of any one of SEQ ID NOs: 521, 522, 525, 526, 529, or 530. In some embodiments, the Cryptic protein:Cryptic family protein 1B heteromultimer comprises a polypeptide that is at least 70%, 75%, 80%, 85%, 90%, 91%, 92%, 93%, 94%, 95%, 95%, 96%, 97%, 98%, 99%, or 100% identical to a polypeptide that begins at any one of amino acids of 26-90 of SEQ ID NO: 521 and ends at any one of amino acids 157-233 of SEQ ID NO: 521. In some embodiments, the Cryptic protein:Cryptic family protein 1B heteromultimer comprises a polypeptide that is at least 70%, 75%, 80%, 85%, 90%, 91%, 92%, 93%, 94%, 95%, 95%, 96%, 97%, 98%, 99%, or 100% identical to a polypeptide that begins at any one of amino acids of 26-30 of SEQ ID NO: 525 and ends at any one of amino acids 82-191 of SEQ ID NO: 525. In some embodiments, the Cryptic protein:Cryptic family protein 1B heteromultimer comprises a polypeptide that is at least 70%, 75%, 80%, 85%, 90%, 91%, 92%, 93%, 94%, 95%, 95%, 96%, 97%, 98%, 99%, or 100% identical to a polypeptide that begins at any one of amino acids of 26-30 of SEQ ID NO: 529, and ends at any one of amino acids 82-148 of SEQ ID NO: 529. In some embodiments, the Cryptic protein:Cryptic family protein 1B heteromultimer comprises a polypeptide that is at least 70%, 75%, 80%, 85%, 90%, 91%, 92%, 93%, 94%, 95%, 95%, 96%, 97%, 98%, 99%, or 100% identical to the amino acid sequence of any one of SEQ ID NOs: 533 or 534. In some embodiments, the Cryptic protein:Cryptic family protein 1B heteromultimer comprises a polypeptide that is at least 70%, 75%, 80%, 85%, 90%, 91%, 92%, 93%, 94%, 95%, 95%, 96%, 97%, 98%, 99%, or 100% identical to a polypeptide that begins at any one of amino acids of 26-30 of SEQ ID NO: 533 and ends at any one of amino acids 82-223 of SEQ ID NO: 533. In certain preferred embodiments, Cryptic protein:Cryptic family protein 1B heteromultimers are soluble. In some embodiments, a Cryptic protein:Cryptic family protein 1B heteromultimer of the disclosure binds to one or more TGF-beta superfamily ligands (e.g., binds to one or more TGF-beta superfamily ligands with a K_{D} of at least 1×10⁻⁷). In some embodiments, a Cryptic protein:Cryptic family protein 1B heteromultimer of the disclosure inhibits one or more TGF-beta superfamily ligands (e.g., inhibits Smad signaling). Heteromultimer-ligand binding and inhibition may be determined using a variety of assays including, for example, those described herein (e.g., in vitro binding and/or cell-based signaling assays). In some embodiments, a Cryptic protein:Cryptic family protein 1B heteromultimer of the disclosure has a different TGF-beta ligand binding and/or inhibition profile (specificity) compared to a corresponding homomultimer (e.g., Cryptic protein and Cryptic family protein 1B homomultimers). In some embodiments, a Cryptic protein:Cryptic family protein 1B heteromultimer of the disclosure is a heterodimer.

[0182] In certain aspects, the disclosure relates to heteromultimers that comprise at least one Cryptic protein polypeptide, which includes fragments, functional variants, and modified forms thereof, and at least one Crim1 polypeptide, which includes fragments, functional variants, and modified forms thereof. In some embodiments, the Cryptic protein:Crim1 heteromultimer comprises a polypeptide that is at least 70%, 75%, 80%, 85%, 90%, 91%, 92%, 93%, 94%, 95%, 95%, 96%, 97%, 98%, 99%, or 100% identical to the amino acid sequence of any one of SEQ ID NOs: 521, 522, 525, 526, 529, or 530. In some embodiments, the Cryptic protein:Crim1 heteromultimer comprises a polypeptide that is at least 70%, 75%, 80%, 85%, 90%, 91%, 92%, 93%, 94%, 95%, 95%, 96%, 97%, 98%, 99%, or 100% identical to a polypeptide that begins at any one of amino acids of 26-90 of SEQ ID NO: 521 and ends at any one of amino acids 157-233 of SEQ ID NO: 521. In some embodiments, the Cryptic protein:Crim1 heteromultimer comprises a polypeptide that is at least 70%, 75%, 80%, 85%, 90%, 91%, 92%, 93%, 94%, 95%, 95%, 96%, 97%, 98%, 99%, or 100% identical to a polypeptide that begins at any one of amino acids of 26-30 of SEQ ID NO: 525 and ends at any one of amino acids 82-191 of SEQ ID NO: 525. In some embodiments, the Cryptic protein:Crim1 heteromultimer comprises a polypeptide that is at least 70%, 75%, 80%, 85%, 90%, 91%, 92%, 93%, 94%, 95%, 95%, 96%, 97%, 98%, 99%, or 100% identical to a polypeptide that begins at any one of amino acids of 26-30 of SEQ ID NO: 529, and ends at any one of amino acids 82-148 of SEQ ID NO: 529. In some embodiments, the Cryptic protein:Crim1 heteromultimer comprises a polypeptide that is at least 70%, 75%, 80%, 85%, 90%, 91%, 92%, 93%, 94%, 95%, 95%, 96%, 97%, 98%, 99%, or 100% identical to the amino acid sequence of any one of SEQ ID NOs: 537 or 538. In some embodiments, the Cryptic protein:Crim1 heteromultimer comprises a polypeptide that is at least 70%, 75%, 80%, 85%, 90%, 91%, 92%, 93%, 94%, 95%, 95%, 96%, 97%, 98%, 99%, or 100% identical to a polypeptide that begins at any one of amino acids of 35-37 of SEQ ID NO: 537 and ends at any one of amino acids 873-939 of SEQ ID NO: 537. In certain preferred embodiments, Cryptic protein:Crim1 heteromultimers are soluble. In some embodiments, a Cryptic protein:Crim1 heteromultimer of the disclosure binds to one or more TGF-beta superfamily ligands (e.g., binds to one or more TGF-beta superfamily ligands with a K_{D} of at least 1×10⁻⁷). In some embodiments, a Cryptic protein:Crim1 heteromultimer of the disclosure inhibits one or more TGF-beta superfamily ligands (e.g., inhibits Smad signaling). Heteromultimer-ligand binding and inhibition may be determined using a variety of assays including, for example, those described herein (e.g., in vitro binding and/or cell-based signaling assays). In some embodiments, a Cryptic protein:Crim1 heteromultimer of the disclosure has a different TGF-beta ligand binding and/or inhibition profile (specificity) compared to a corresponding homomultimer (e.g., Cryptic protein and Crim1 homomultimers). In some embodiments, a Cryptic protein:Crim1 heteromultimer of the disclosure is a heterodimer.

[0183] In certain aspects, the disclosure relates to heteromultimers that comprise at least one Cryptic protein polypeptide, which includes fragments, functional variants, and modified forms thereof, and at least one Crim2 polypeptide, which includes fragments, functional variants, and modified forms thereof. In some embodiments, the Cryptic protein:Crim2 heteromultimer comprises a polypeptide that is at least 70%, 75%, 80%, 85%, 90%, 91%, 92%, 93%, 94%, 95%, 95%, 96%, 97%, 98%, 99%, or 100% identical to the amino acid sequence of any one of SEQ ID NOs: 521, 522, 525, 526, 529, or 530. In some embodiments, the Cryptic protein:Crim2 heteromultimer comprises a polypeptide that is at least 70%, 75%, 80%, 85%, 90%, 91%, 92%, 93%, 94%, 95%, 95%, 96%, 97%, 98%, 99%, or 100% identical to a polypeptide that begins at any one of amino acids of 26-90 of SEQ ID NO: 521 and ends at any one of amino acids 157-233 of SEQ ID NO: 521. In some embodiments, the Cryptic protein:Crim2 heteromultimer comprises a polypeptide that is at least 70%, 75%, 80%, 85%, 90%, 91%, 92%, 93%, 94%, 95%, 95%, 96%, 97%, 98%, 99%, or 100% identical to a polypeptide that begins at any one of amino acids of 26-30 of SEQ ID NO: 525 and ends at any one of amino acids 82-191 of SEQ ID NO: 525. In some embodiments, the Cryptic protein:Crim2 heteromultimer comprises a polypeptide that is at least 70%, 75%, 80%, 85%, 90%, 91%, 92%, 93%, 94%, 95%, 95%, 96%, 97%, 98%, 99%, or 100% identical to a polypeptide that begins at any one of amino acids of 26-30 of SEQ ID NO: 529, and ends at any one of amino acids 82-148 of SEQ ID NO: 529. In some embodiments, the Cryptic protein:Crim2 heteromultimer comprises a polypeptide that is at least 70%, 75%, 80%, 85%, 90%, 91%, 92%, 93%, 94%, 95%, 95%, 96%, 97%, 98%, 99%, or 100% identical to the amino acid sequence of any one of SEQ ID NOs: 541, 542, 545, or 546. In some embodiments, the Cryptic protein:Crim2 heteromultimer comprises a polypeptide that is at least 70%, 75%, 80%, 85%, 90%, 91%, 92%, 93%, 94%, 95%, 95%, 96%, 97%, 98%, 99%, or 100% identical to a polypeptide that begins at any one of amino acids of 26-138 of SEQ ID NO: 541 and ends at any one of amino acids 1298-1503 of SEQ ID NO: 541. In some embodiments, the Cryptic protein:Crim2 heteromultimer comprises a polypeptide that is at least 70%, 75%, 80%, 85%, 90%, 91%, 92%, 93%, 94%, 95%, 95%, 96%, 97%, 98%, 99%, or 100% identical to a polypeptide that begins at any one of amino acids of 24-138 of SEQ ID NO: 545 and ends at any one of amino acids 539-814 of SEQ ID NO: 545. In certain preferred embodiments, Cryptic protein:Crim2 heteromultimers are soluble. In some embodiments, a Cryptic protein:Crim2 heteromultimer of the disclosure binds to one or more TGF-beta superfamily ligands (e.g., binds to one or more TGF-beta superfamily ligands with a K_{D} of at least 1×10⁻⁷). In some embodiments, a Cryptic protein:Crim2 heteromultimer of the disclosure inhibits one or more TGF-beta superfamily ligands (e.g., inhibits Smad signaling). Heteromultimer-ligand binding and inhibition may be determined using a variety of assays including, for example, those described herein (e.g., in vitro binding and/or cell-based signaling assays). In some embodiments, a Cryptic protein:Crim2 heteromultimer of the disclosure has a different TGF-beta ligand binding and/or inhibition profile (specificity) compared to a corresponding homomultimer (e.g., Cryptic protein and Crim2 homomultimers). In some embodiments, a Cryptic protein:Crim2 heteromultimer of the disclosure is a heterodimer.

[0184] In certain aspects, the disclosure relates to heteromultimers that comprise at least one Cryptic protein polypeptide, which includes fragments, functional variants, and modified forms thereof, and at least one BAMBI polypeptide, which includes fragments, functional variants, and modified forms thereof. In some embodiments, the Cryptic protein:BAMBI heteromultimer comprises a polypeptide that is at least 70%, 75%, 80%, 85%, 90%, 91%, 92%, 93%, 94%, 95%, 95%, 96%, 97%, 98%, 99%, or 100% identical to the amino acid sequence of any one of SEQ ID NOs: 521, 522, 525, 526, 529, or 530. In some embodiments, the Cryptic protein:BAMBI heteromultimer comprises a polypeptide that is at least 70%, 75%, 80%, 85%, 90%, 91%, 92%, 93%, 94%, 95%, 95%, 96%, 97%, 98%, 99%, or 100% identical to a polypeptide that begins at any one of amino acids of 26-90 of SEQ ID NO: 521 and ends at any one of amino acids 157-233 of SEQ ID NO: 521. In some embodiments, the Cryptic protein:BAMBI heteromultimer comprises a polypeptide that is at least 70%, 75%, 80%, 85%, 90%, 91%, 92%, 93%, 94%, 95%, 95%, 96%, 97%, 98%, 99%, or 100% identical to a polypeptide that begins at any one of amino acids of 26-30 of SEQ ID NO: 525 and ends at any one of amino acids 82-191 of SEQ ID NO: 525. In some embodiments, the Cryptic protein:BAMBI heteromultimer comprises a polypeptide that is at least 70%, 75%, 80%, 85%, 90%, 91%, 92%, 93%, 94%, 95%, 95%, 96%, 97%, 98%, 99%, or 100% identical to a polypeptide that begins at any one of amino acids of 26-30 of SEQ ID NO: 529, and ends at any one of amino acids 82-148 of SEQ ID NO: 529. In some embodiments, the Cryptic protein:BAMBI heteromultimer comprises a polypeptide that is at least 70%, 75%, 80%, 85%, 90%, 91%, 92%, 93%, 94%, 95%, 95%, 96%, 97%, 98%, 99%, or 100% identical to the amino acid sequence of any one of SEQ ID NOs: 549 or 550. In some embodiments, the Cryptic protein:BAMBI heteromultimer comprises a polypeptide that is at least 70%, 75%, 80%, 85%, 90%, 91%, 92%, 93%, 94%, 95%, 95%, 96%, 97%, 98%, 99%, or 100% identical to a polypeptide that begins at any one of amino acids of 21-30 of SEQ ID NO: 549 and ends at any one of amino acids 104-152 of SEQ ID NO: 549. In certain preferred embodiments, Cryptic protein:BAMBI heteromultimers are soluble. In some embodiments, a Cryptic protein:BAMBI heteromultimer of the disclosure binds to one or more TGF-beta superfamily ligands (e.g., binds to one or more TGF-beta superfamily ligands with a K_{D} of at least 1×10⁻⁷). In some embodiments, a Cryptic protein:BAMBI heteromultimer of the disclosure inhibits one or more TGF-beta superfamily ligands (e.g., inhibits Smad signaling). Heteromultimer-ligand binding and inhibition may be determined using a variety of assays including, for example, those described herein (e.g., in vitro binding and/or cell-based signaling assays). In some embodiments, a Cryptic protein:BAMBI heteromultimer of the disclosure has a different TGF-beta ligand binding and/or inhibition profile (specificity) compared to a corresponding homomultimer (e.g., Cryptic protein and BAMBI homomultimers). In some embodiments, a Cryptic protein:BAMBI heteromultimer of the disclosure is a heterodimer.

[0185] In certain aspects, the disclosure relates to heteromultimers that comprise at least one Cryptic protein polypeptide, which includes fragments, functional variants, and modified forms thereof, and at least one BMPER polypeptide, which includes fragments, functional variants, and modified forms thereof. In some embodiments, the Cryptic protein:BMPER heteromultimer comprises a polypeptide that is at least 70%, 75%, 80%, 85%, 90%, 91%, 92%, 93%, 94%, 95%, 95%, 96%, 97%, 98%, 99%, or 100% identical to the amino acid sequence of any one of SEQ ID NOs: 521, 522, 525, 526, 529, or 530. In some embodiments, the Cryptic protein:BMPER heteromultimer comprises a polypeptide that is at least 70%, 75%, 80%, 85%, 90%, 91%, 92%, 93%, 94%, 95%, 95%, 96%, 97%, 98%, 99%, or 100% identical to a polypeptide that begins at any one of amino acids of 26-90 of SEQ ID NO: 521 and ends at any one of amino acids 157-233 of SEQ ID NO: 521. In some embodiments, the Cryptic protein:BMPER heteromultimer comprises a polypeptide that is at least 70%, 75%, 80%, 85%, 90%, 91%, 92%, 93%, 94%, 95%, 95%, 96%, 97%, 98%, 99%, or 100% identical to a polypeptide that begins at any one of amino acids of 26-30 of SEQ ID NO: 525 and ends at any one of amino acids 82-191 of SEQ ID NO: 525. In some embodiments, the Cryptic protein:BMPER heteromultimer comprises a polypeptide that is at least 70%, 75%, 80%, 85%, 90%, 91%, 92%, 93%, 94%, 95%, 95%, 96%, 97%, 98%, 99%, or 100% identical to a polypeptide that begins at any one of amino acids of 26-30 of SEQ ID NO: 529, and ends at any one of amino acids 82-148 of SEQ ID NO: 529. In some embodiments, the Cryptic protein:BMPER heteromultimer comprises a polypeptide that is at least 70%, 75%, 80%, 85%, 90%, 91%, 92%, 93%, 94%, 95%, 95%, 96%, 97%, 98%, 99%, or 100% identical to the amino acid sequence of any one of SEQ ID NOs: 553 or 554. In some embodiments, the Cryptic protein:BMPER heteromultimer comprises a polypeptide that is at least 70%, 75%, 80%, 85%, 90%, 91%, 92%, 93%, 94%, 95%, 95%, 96%, 97%, 98%, 99%, or 100% identical to a polypeptide that begins at any one of amino acids of 39-50 of SEQ ID NO: 553 and ends at any one of amino acids 364-369 of SEQ ID NO: 553. In some embodiments, the Cryptic protein:BMPER heteromultimer comprises a polypeptide that is at least 70%, 75%, 80%, 85%, 90%, 91%, 92%, 93%, 94%, 95%, 95%, 96%, 97%, 98%, 99%, or 100% identical to a polypeptide that begins at any one of amino acids of 370-386 of SEQ ID NO: 553 and ends at any one of amino acids 682-685 of SEQ ID NO: 553. In some embodiments, the Cryptic protein:BMPER heteromultimer comprises a polypeptide that is at least 70%, 75%, 80%, 85%, 90%, 91%, 92%, 93%, 94%, 95%, 95%, 96%, 97%, 98%, 99%, or 100% identical to a polypeptide that begins at any one of amino acids of 39-50 of SEQ ID NO: 553 and ends at any one of amino acids 682-685 of SEQ ID NO: 553. In some embodiments, the Cryptic protein:BMPER heteromultimer comprises a BMPER protein, wherein the BMPER protein is a dimer comprising a first polypeptide that is at least 70%, 75%, 80%, 85%, 90%, 91%, 92%, 93%, 94%, 95%, 96%, 97%, 98%, 99%, or 100% identical to a polypeptide that begins at any one of amino acids of 39-50 of SEQ ID NO: 553 and ends at any one of amino acids 364-369 of SEQ ID NO: 553, and second polypeptide that is at least 70%, 75%, 80%, 85%, 90%, 91%, 92%, 93%, 94%, 95%, 96%, 97%, 98%, 99%, or 100% identical to a polypeptide that begins at any one of amino acids of 370-386 of SEQ ID NO: 553, and ends at any one of amino acids 682-685 of SEQ ID NO: 553. In some embodiments, the Cryptic protein:BMPER heteromultimer comprises a single chain ligand trap that comprises a first BMPER polypeptide domain that is at least 70%, 75%, 80%, 85%, 90%, 91%, 92%, 93%, 94%, 95%, 96%, 97%, 98%, 99%, or 100% identical to a polypeptide that begins at any one of amino acids of 39-50 of SEQ ID NO: 553 and ends at any one of amino acids 364-369 of SEQ ID NO: 553, and second BMPER polypeptide domain that is at least 70%, 75%, 80%, 85%, 90%, 91%, 92%, 93%, 94%, 95%, 96%, 97%, 98%, 99%, or 100% identical to a polypeptide that begins at any one of amino acids of 370-386 of SEQ ID NO: 553 and ends at any one of amino acids 682-685 of SEQ ID NO: 553. In certain preferred embodiments, Cryptic protein:BMPER heteromultimers are soluble. In some embodiments, a Cryptic protein:BMPER heteromultimer of the disclosure binds to one or more TGF-beta superfamily ligands (e.g., binds to one or more TGF-beta superfamily ligands with a K_{D} of at least 1×10⁻⁷). In some embodiments, a Cryptic protein:BMPER heteromultimer of the disclosure inhibits one or more TGF-beta superfamily ligands (e.g., inhibits Smad signaling). Heteromultimer-ligand binding and inhibition may be determined using a variety of assays including, for example, those described herein (e.g., in vitro binding and/or cell-based signaling assays). In some embodiments, a Cryptic protein:BMPER heteromultimer of the disclosure has a different TGF-beta ligand binding and/or inhibition profile (specificity) compared to a corresponding homomultimer (e.g., Cryptic protein and BMPER homomultimers). In some embodiments, a Cryptic protein:BMPER heteromultimer of the disclosure is a heterodimer.

[0186] In certain aspects, the disclosure relates to heteromultimers that comprise at least one Cryptic protein polypeptide, which includes fragments, functional variants, and modified forms thereof, and at least one RGM-A polypeptide, which includes fragments, functional variants, and modified forms thereof. In some embodiments, the Cryptic protein:RGM-A heteromultimer comprises a polypeptide that is at least 70%, 75%, 80%, 85%, 90%, 91%, 92%, 93%, 94%, 95%, 95%, 96%, 97%, 98%, 99%, or 100% identical to the amino acid sequence of any one of SEQ ID NOs: 521, 522, 525, 526, 529, or 530. In some embodiments, the Cryptic protein:RGM-A heteromultimer comprises a polypeptide that is at least 70%, 75%, 80%, 85%, 90%, 91%, 92%, 93%, 94%, 95%, 95%, 96%, 97%, 98%, 99%, or 100% identical to a polypeptide that begins at any one of amino acids of 26-90 of SEQ ID NO: 521 and ends at any one of amino acids 157-233 of SEQ ID NO: 521. In some embodiments, the Cryptic protein:RGM-A heteromultimer comprises a polypeptide that is at least 70%, 75%, 80%, 85%, 90%, 91%, 92%, 93%, 94%, 95%, 95%, 96%, 97%, 98%, 99%, or 100% identical to a polypeptide that begins at any one of amino acids of 26-30 of SEQ ID NO: 525 and ends at any one of amino acids 82-191 of SEQ ID NO: 525. In some embodiments, the Cryptic protein:RGM-A heteromultimer comprises a polypeptide that is at least 70%, 75%, 80%, 85%, 90%, 91%, 92%, 93%, 94%, 95%, 95%, 96%, 97%, 98%, 99%, or 100% identical to a polypeptide that begins at any one of amino acids of 26-30 of SEQ ID NO: 529, and ends at any one of amino acids 82-148 of SEQ ID NO: 529. In some embodiments, the Cryptic protein:RGM-A heteromultimer comprises a polypeptide that is at least 70%, 75%, 80%, 85%, 90%, 91%, 92%, 93%, 94%, 95%, 95%, 96%, 97%, 98%, 99%, or 100% identical to the amino acid sequence of any one of SEQ ID NOs: 553 or 554. In some embodiments, the Cryptic protein:RGM-A heteromultimer comprises a polypeptide that is at least 70%, 75%, 80%, 85%, 90%, 91%, 92%, 93%, 94%, 95%, 95%, 96%, 97%, 98%, 99%, or 100% identical to a polypeptide that begins at any one of amino acids of 1-177 of SEQ ID NO: 561 and ends at any one of amino acids 430-458 of SEQ ID NO: 561. In some embodiments, the Cryptic protein:RGM-A heteromultimer comprises a polypeptide that is at least 70%, 75%, 80%, 85%, 90%, 91%, 92%, 93%, 94%, 95%, 95%, 96%, 97%, 98%, 99%, or 100% identical to a polypeptide that begins at any one of amino acids of 1-153 of SEQ ID NO: 565 and ends at any one of amino acids 406-434 of SEQ ID NO: 565. In some embodiments, the Cryptic protein:RGM-A heteromultimer comprises a polypeptide that is at least 70%, 75%, 80%, 85%, 90%, 91%, 92%, 93%, 94%, 95%, 95%, 96%, 97%, 98%, 99%, or 100% identical to a polypeptide that begins at any one of amino acids of 1-169 of SEQ ID NO: 569 and ends at any one of amino acids 422-450 of SEQ ID NO: 569. In certain preferred embodiments, Cryptic protein:RGM-A heteromultimers are soluble. In some embodiments, a Cryptic protein:RGM-A heteromultimer of the disclosure binds to one or more TGF-beta superfamily ligands (e.g., binds to one or more TGF-beta superfamily ligands with a K_{D} of at least 1×10⁻⁷). In some embodiments, a Cryptic protein:RGM-A heteromultimer of the disclosure inhibits one or more TGF-beta superfamily ligands (e.g., inhibits Smad signaling). Heteromultimer-ligand binding and inhibition may be determined using a variety of assays including, for example, those described herein (e.g., in vitro binding and/or cell-based signaling assays). In some embodiments, a Cryptic protein:RGM-A heteromultimer of the disclosure has a different TGF-beta ligand binding and/or inhibition profile (specificity) compared to a corresponding homomultimer (e.g., Cryptic protein and RGM-A homomultimers). In some embodiments, a Cryptic protein:RGM-A heteromultimer of the disclosure is a heterodimer.

[0187] In certain aspects, the disclosure relates to heteromultimers that comprise at least one Cryptic protein polypeptide, which includes fragments, functional variants, and modified forms thereof, and at least one RGM-B polypeptide, which includes fragments, functional variants, and modified forms thereof. In some embodiments, the Cryptic protein:RGM-B heteromultimer comprises a polypeptide that is at least 70%, 75%, 80%, 85%, 90%, 91%, 92%, 93%, 94%, 95%, 95%, 96%, 97%, 98%, 99%, or 100% identical to the amino acid sequence of any one of SEQ ID NOs: 521, 522, 525, 526, 529, or 530. In some embodiments, the Cryptic protein:RGM-B heteromultimer comprises a polypeptide that is at least 70%, 75%, 80%, 85%, 90%, 91%, 92%, 93%, 94%, 95%, 95%, 96%, 97%, 98%, 99%, or 100% identical to a polypeptide that begins at any one of amino acids of 26-90 of SEQ ID NO: 521 and ends at any one of amino acids 157-233 of SEQ ID NO: 521. In some embodiments, the Cryptic protein:RGM-B heteromultimer comprises a polypeptide that is at least 70%, 75%, 80%, 85%, 90%, 91%, 92%, 93%, 94%, 95%, 95%, 96%, 97%, 98%, 99%, or 100% identical to a polypeptide that begins at any one of amino acids of 26-30 of SEQ ID NO: 525 and ends at any one of amino acids 82-191 of SEQ ID NO: 525. In some embodiments, the Cryptic protein:RGM-B heteromultimer comprises a polypeptide that is at least 70%, 75%, 80%, 85%, 90%, 91%, 92%, 93%, 94%, 95%, 95%, 96%, 97%, 98%, 99%, or 100% identical to a polypeptide that begins at any one of amino acids of 26-30 of SEQ ID NO: 529, and ends at any one of amino acids 82-148 of SEQ ID NO: 529. In some embodiments, the Cryptic protein:RGM-B heteromultimer comprises a polypeptide that is at least 70%, 75%, 80%, 85%, 90%, 91%, 92%, 93%, 94%, 95%, 95%, 96%, 97%, 98%, 99%, or 100% identical to the amino acid sequence of any one of SEQ ID NOs: 557 or 558. In some embodiments, the Cryptic protein:RGM-B heteromultimer comprises a polypeptide that is at least 70%, 75%, 80%, 85%, 90%, 91%, 92%, 93%, 94%, 95%, 95%, 96%, 97%, 98%, 99%, or 100% identical to a polypeptide that begins at any one of amino acids of 1-87 of SEQ ID NO: 557 and ends at any one of amino acids 452-478 of SEQ ID NO: 557. In some embodiments, the Cryptic protein:RGM-B heteromultimer comprises a polypeptide that is at least 70%, 75%, 80%, 85%, 90%, 91%, 92%, 93%, 94%, 95%, 95%, 96%, 97%, 98%, 99%, or 100% identical to a polypeptide that begins at any one of amino acids of 210-222 of SEQ ID NO: 557 and ends at any one of amino acids 413-452 of SEQ ID NO: 557. In some embodiments, the Cryptic protein:RGM-B heteromultimer comprises a polypeptide that is at least 70%, 75%, 80%, 85%, 90%, 91%, 92%, 93%, 94%, 95%, 95%, 96%, 97%, 98%, 99%, or 100% identical to a polypeptide that begins at any one of amino acids of 87-95 of SEQ ID NO: 557 and ends at any one of amino acids 204-209 of SEQ ID NO: 557. In some embodiments, the Cryptic protein:RGM-B heteromultimer comprises a RGM-B protein, wherein the RGM-B protein is a dimer comprising a first polypeptide that is at least 70%, 75%, 80%, 85%, 90%, 91%, 92%, 93%, 94%, 95%, 96%, 97%, 98%, 99%, or 100% identical to a polypeptide that begins at any one of amino acids of 87-95 of SEQ ID NO: 557 and ends at any one of amino acids 204-209 of SEQ ID NO: 557 and second polypeptide that is at least 70%, 75%, 80%, 85%, 90%, 91%, 92%, 93%, 94%, 95%, 96%, 97%, 98%, 99%, or 100% identical to a polypeptide that begins at any one of amino acids of 210-222 of SEQ ID NO: 557 and ends at any one of amino acids 413-452 of SEQ ID NO: 557. In some embodiments, the Cryptic protein:RGM-B heteromultimer comprises a single chain ligand trap that comprises a first RGM-B polypeptide domain that is at least 70%, 75%, 80%, 85%, 90%, 91%, 92%, 93%, 94%, 95%, 96%, 97%, 98%, 99%, or 100% identical to a polypeptide that begins at any one of amino acids of 87-95 of SEQ ID NO: 557 and ends at any one of amino acids 204-209 of SEQ ID NO: 557 and second RGM-B polypeptide domain that is at least 70%, 75%, 80%, 85%, 90%, 91%, 92%, 93%, 94%, 95%, 96%, 97%, 98%, 99%, or 100% identical to a polypeptide that begins at any one of amino acids of 210-222 of SEQ ID NO: 557 and ends at any one of amino acids 413-452 of SEQ ID NO: 557. In certain preferred embodiments, Cryptic protein:RGM-B heteromultimers are soluble. In some embodiments, a Cryptic protein:RGM-B heteromultimer of the disclosure binds to one or more TGF-beta superfamily ligands (e.g., binds to one or more TGF-beta superfamily ligands with a K_{D} of at least 1×10⁻⁷). In some embodiments, a Cryptic protein:RGM-B heteromultimer of the disclosure inhibits one or more TGF-beta superfamily ligands (e.g., inhibits Smad signaling). Heteromultimer-ligand binding and inhibition may be determined using a variety of assays including, for example, those described herein (e.g., in vitro binding and/or cell-based signaling assays). In some embodiments, a Cryptic protein:RGM-B heteromultimer of the disclosure has a different TGF-beta ligand binding and/or inhibition profile (specificity) compared to a corresponding homomultimer (e.g., Cryptic protein and RGM-B homomultimers). In some embodiments, a Cryptic protein:RGM-B heteromultimer of the disclosure is a heterodimer.

[0188] In certain aspects, the disclosure relates to heteromultimers that comprise at least one Cryptic protein polypeptide, which includes fragments, functional variants, and modified forms thereof, and at least one hemojuvelin polypeptide, which includes fragments, functional variants, and modified forms thereof. In some embodiments, the Cryptic protein:hemojuvelin heteromultimer comprises a polypeptide that is at least 70%, 75%, 80%, 85%, 90%, 91%, 92%, 93%, 94%, 95%, 95%, 96%, 97%, 98%, 99%, or 100% identical to the amino acid sequence of any one of SEQ ID NOs: 521, 522, 525, 526, 529, or 530. In some embodiments, the Cryptic protein:hemojuvelin heteromultimer comprises a polypeptide that is at least 70%, 75%, 80%, 85%, 90%, 91%, 92%, 93%, 94%, 95%, 95%, 96%, 97%, 98%, 99%, or 100% identical to a polypeptide that begins at any one of amino acids of 26-90 of SEQ ID NO: 521 and ends at any one of amino acids 157-233 of SEQ ID NO: 521. In some embodiments, the Cryptic protein:hemojuvelin heteromultimer comprises a polypeptide that is at least 70%, 75%, 80%, 85%, 90%, 91%, 92%, 93%, 94%, 95%, 95%, 96%, 97%, 98%, 99%, or 100% identical to a polypeptide that begins at any one of amino acids of 26-30 of SEQ ID NO: 525 and ends at any one of amino acids 82-191 of SEQ ID NO: 525. In some embodiments, the Cryptic protein:hemojuvelin heteromultimer comprises a polypeptide that is at least 70%, 75%, 80%, 85%, 90%, 91%, 92%, 93%, 94%, 95%, 95%, 96%, 97%, 98%, 99%, or 100% identical to a polypeptide that begins at any one of amino acids of 26-30 of SEQ ID NO: 529, and ends at any one of amino acids 82-148 of SEQ ID NO: 529. In some embodiments, the Cryptic protein:hemojuvelin heteromultimer comprises a polypeptide that is at least 70%, 75%, 80%, 85%, 90%, 91%, 92%, 93%, 94%, 95%, 95%, 96%, 97%, 98%, 99%, or 100% identical to the amino acid sequence of any one of SEQ ID NOs: 573, 574, 577, 578, 581, or 582. In some embodiments, the Cryptic protein:hemojuvelin heteromultimer comprises a polypeptide that is at least 70%, 75%, 80%, 85%, 90%, 91%, 92%, 93%, 94%, 95%, 95%, 96%, 97%, 98%, 99%, or 100% identical to a polypeptide that begins at any one of amino acids of 1-36 of SEQ ID NO: 573 and ends at any one of amino acids 400-426 of SEQ ID NO: 573. In some embodiments, the Cryptic protein:hemojuvelin heteromultimer comprises a polypeptide that is at least 70%, 75%, 80%, 85%, 90%, 91%, 92%, 93%, 94%, 95%, 95%, 96%, 97%, 98%, 99%, or 100% identical to a polypeptide that begins at any one of amino acids of 36-42 of SEQ ID NO: 573 and ends at any one of amino acids 167-172 of SEQ ID NO: 573. In some embodiments, the Cryptic protein:hemojuvelin heteromultimer comprises a polypeptide that is at least 70%, 75%, 80%, 85%, 90%, 91%, 92%, 93%, 94%, 95%, 95%, 96%, 97%, 98%, 99%, or 100% identical to a polypeptide that begins at any one of amino acids of 173-185 of SEQ ID NO: 573 and ends at any one of amino acids 361-400 of SEQ ID NO: 573. In some embodiments, the Cryptic protein:hemojuvelin heteromultimer comprises a hemojuvelin protein that is a dimer comprising a first polypeptide that is at least 70%, 75%, 80%, 85%, 90%, 91%, 92%, 93%, 94%, 95%, 96%, 97%, 98%, 99%, or 100% identical to a polypeptide that begins at any one of amino acids of 36-42 of SEQ ID NO: 573, and ends at any one of amino acids 167-172 of SEQ ID NO: 573 and second polypeptide that is at least 70%, 75%, 80%, 85%, 90%, 91%, 92%, 93%, 94%, 95%, 96%, 97%, 98%, 99%, or 100% identical to a polypeptide that begins at any one of amino acids of 173-185 of SEQ ID NO: 573 and ends at any one of amino acids 361-400 of SEQ ID NO: 573. In some embodiments, the Cryptic protein:hemojuvelin heteromultimer comprises a single chain ligand trap that comprises a first hemojuvelin polypeptide domain that is at least 70%, 75%, 80%, 85%, 90%, 91%, 92%, 93%, 94%, 95%, 96%, 97%, 98%, 99%, or 100% identical to a polypeptide that begins at any one of amino acids of 36-42 of SEQ ID NO: 573 and ends at any one of amino acids 167-172 of SEQ ID NO: 573 and second hemojuvelin polypeptide domain that is at least 70%, 75%, 80%, 85%, 90%, 91%, 92%, 93%, 94%, 95%, 96%, 97%, 98%, 99%, or 100% identical to a polypeptide that begins at any one of amino acids of 173-185 of SEQ ID NO: 573 and ends at any one of amino acids 361-400 of SEQ ID NO: 573. In some embodiments, the Cryptic protein:hemojuvelin heteromultimer comprises a polypeptide that is at least 70%, 75%, 80%, 85%, 90%, 91%, 92%, 93%, 94%, 95%, 95%, 96%, 97%, 98%, 99%, or 100% identical to a polypeptide that begins at any one of amino acids of 1-6 of SEQ ID NO: 577 and ends at any one of amino acids 287-313 of SEQ ID NO: 577. In some embodiments, the Cryptic protein:hemojuvelin heteromultimer comprises a polypeptide that is at least 70%, 75%, 80%, 85%, 90%, 91%, 92%, 93%, 94%, 95%, 95%, 96%, 97%, 98%, 99%, or 100% identical to a polypeptide that begins at any one of amino acids of 1-6 of SEQ ID NO: 577 and ends at any one of amino acids 54-59 of SEQ ID NO: 577. In some embodiments, the Cryptic protein:hemojuvelin heteromultimer comprises a polypeptide that is at least 70%, 75%, 80%, 85%, 90%, 91%, 92%, 93%, 94%, 95%, 95%, 96%, 97%, 98%, 99%, or 100% identical to a polypeptide that begins at any one of amino acids of 60-72 of SEQ ID NO: 577 and ends at any one of amino acids 248-287 of SEQ ID NO: 577. In some embodiments, the Cryptic protein:hemojuvelin heteromultimer comprises a hemojuvelin protein, wherein the hemojuvelin protein is a dimer comprising a first polypeptide that is at least 70%, 75%, 80%, 85%, 90%, 91%, 92%, 93%, 94%, 95%, 96%, 97%, 98%, 99%, or 100% identical to a polypeptide that begins at any one of amino acids of 1-6 of SEQ ID NO: 577 and ends at any one of amino acids 54-59 of SEQ ID NO: 577, and second polypeptide that is at least 70%, 75%, 80%, 85%, 90%, 91%, 92%, 93%, 94%, 95%, 96%, 97%, 98%, 99%, or 100% identical to a polypeptide that begins at any one of amino acids of 60-72 of SEQ ID NO: 577 and ends at any one of amino acids 248-287 of SEQ ID NO: 577. In some embodiments, the Cryptic protein:hemojuvelin heteromultimer comprises a single chain ligand trap that comprises a first hemojuvelin polypeptide domain that is at least 70%, 75%, 80%, 85%, 90%, 91%, 92%, 93%, 94%, 95%, 96%, 97%, 98%, 99%, or 100% identical to a polypeptide that begins at any one of amino acids of 1-6 of SEQ ID NO: 577 and ends at any one of amino acids 54-59 of SEQ ID NO: 577, and second hemojuvelin polypeptide domain that is at least 70%, 75%, 80%, 85%, 90%, 91%, 92%, 93%, 94%, 95%, 96%, 97%, 98%, 99%, or 100% identical to a polypeptide that begins at any one of amino acids of 60-72 of SEQ ID NO: 577, and ends at any one of amino acids 248-287 of SEQ ID NO: 577. In some embodiments, the Cryptic protein:hemojuvelin heteromultimer comprises a polypeptide that is at least 70%, 75%, 80%, 85%, 90%, 91%, 92%, 93%, 94%, 95%, 95%, 96%, 97%, 98%, 99%, or 100% identical to a polypeptide that begins at any one of amino acids of 1-4 of SEQ ID NO: 581 and ends at any one of amino acids 135-200 of SEQ ID NO: 581. In certain preferred embodiments, Cryptic protein:hemojuvelin heteromultimers are soluble. In some embodiments, a Cryptic protein:hemojuvelin heteromultimer of the disclosure binds to one or more TGF-beta superfamily ligands (e.g., binds to one or more TGF-beta superfamily ligands with a K_{D} of at least 1×10⁻⁷). In some embodiments, a Cryptic protein:hemojuvelin heteromultimer of the disclosure inhibits one or more TGF-beta superfamily ligands (e.g., inhibits Smad signaling). Heteromultimer-ligand binding and inhibition may be determined using a variety of assays including, for example, those described herein (e.g., in vitro binding and/or cell-based signaling assays). In some embodiments, a Cryptic protein:hemojuvelin heteromultimer of the disclosure has a different TGF-beta ligand binding and/or inhibition profile (specificity) compared to a corresponding homomultimer (e.g., Cryptic protein and hemojuvelin homomultimers). In some embodiments, a Cryptic protein:hemojuvelin heteromultimer of the disclosure is a heterodimer.

[0189] In certain aspects, the disclosure relates to heteromultimers that comprise at least one Cryptic family protein 1B polypeptide, which includes fragments, functional variants, and modified forms thereof, and at least one Crim1 polypeptide, which includes fragments, functional variants, and modified forms thereof. In some embodiments, the Cryptic family protein 1B:Crim1 heteromultimer comprises a polypeptide that is at least 70%, 75%, 80%, 85%, 90%, 91%, 92%, 93%, 94%, 95%, 95%, 96%, 97%, 98%, 99%, or 100% identical to the amino acid sequence of any one of SEQ ID NOs: 533 or 534. In some embodiments, the Cryptic family protein 1B:Crim1 heteromultimer comprises a polypeptide that is at least 70%, 75%, 80%, 85%, 90%, 91%, 92%, 93%, 94%, 95%, 95%, 96%, 97%, 98%, 99%, or 100% identical to a polypeptide that begins at any one of amino acids of 26-30 of SEQ ID NO: 533 and ends at any one of amino acids 82-223 of SEQ ID NO: 533. In some embodiments, the Cryptic family protein 1B:Crim1 heteromultimer comprises a polypeptide that is at least 70%, 75%, 80%, 85%, 90%, 91%, 92%, 93%, 94%, 95%, 95%, 96%, 97%, 98%, 99%, or 100% identical to the amino acid sequence of any one of SEQ ID NOs: 537 or 538. In some embodiments, the Cryptic family protein 1B:Crim1 heteromultimer comprises a polypeptide that is at least 70%, 75%, 80%, 85%, 90%, 91%, 92%, 93%, 94%, 95%, 95%, 96%, 97%, 98%, 99%, or 100% identical to a polypeptide that begins at any one of amino acids of 35-37 of SEQ ID NO: 537 and ends at any one of amino acids 873-939 of SEQ ID NO: 537. In certain preferred embodiments, Cryptic family protein 1B:Crim1 heteromultimers are soluble. In some embodiments, a Cryptic family protein 1B:Crim1 heteromultimer of the disclosure binds to one or more TGF-beta superfamily ligands (e.g., binds to one or more TGF-beta superfamily ligands with a K_{D} of at least 1×10⁻⁷). In some embodiments, a Cryptic family protein 1B:Crim1 heteromultimer of the disclosure inhibits one or more TGF-beta superfamily ligands (e.g., inhibits Smad signaling). Heteromultimer-ligand binding and inhibition may be determined using a variety of assays including, for example, those described herein (e.g., in vitro binding and/or cell-based signaling assays). In some embodiments, a Cryptic family protein 1B:Crim1 heteromultimer of the disclosure has a different TGF-beta ligand binding and/or inhibition profile (specificity) compared to a corresponding homomultimer (e.g., Cryptic family protein 1B and Crim1 homomultimers). In some embodiments, a Cryptic family protein 1B:Crim1 heteromultimer of the disclosure is a heterodimer.

[0190] In certain aspects, the disclosure relates to heteromultimers that comprise at least one Cryptic family protein 1B polypeptide, which includes fragments, functional variants, and modified forms thereof, and at least one Crim2 polypeptide, which includes fragments, functional variants, and modified forms thereof. In some embodiments, the Cryptic family protein 1B:Crim2 heteromultimer comprises a polypeptide that is at least 70%, 75%, 80%, 85%, 90%, 91%, 92%, 93%, 94%, 95%, 95%, 96%, 97%, 98%, 99%, or 100% identical to the amino acid sequence of any one of SEQ ID NOs: 533 or 534. In some embodiments, the Cryptic family protein 1B:Crim2 heteromultimer comprises a polypeptide that is at least 70%, 75%, 80%, 85%, 90%, 91%, 92%, 93%, 94%, 95%, 95%, 96%, 97%, 98%, 99%, or 100% identical to a polypeptide that begins at any one of amino acids of 26-30 of SEQ ID NO: 533 and ends at any one of amino acids 82-223 of SEQ ID NO: 533. In some embodiments, the Cryptic family protein 1B:Crim2 heteromultimer comprises a polypeptide that is at least 70%, 75%, 80%, 85%, 90%, 91%, 92%, 93%, 94%, 95%, 95%, 96%, 97%, 98%, 99%, or 100% identical to the amino acid sequence of any one of SEQ ID NOs: 541, 542, 545, or 546. In some embodiments, the Cryptic family protein 1B:Crim2 heteromultimer comprises a polypeptide that is at least 70%, 75%, 80%, 85%, 90%, 91%, 92%, 93%, 94%, 95%, 95%, 96%, 97%, 98%, 99%, or 100% identical to a polypeptide that begins at any one of amino acids of 26-138 of SEQ ID NO: 541 and ends at any one of amino acids 1298-1503 of SEQ ID NO: 541. In some embodiments, the Cryptic family protein 1B:Crim2 heteromultimer comprises a polypeptide that is at least 70%, 75%, 80%, 85%, 90%, 91%, 92%, 93%, 94%, 95%, 95%, 96%, 97%, 98%, 99%, or 100% identical to a polypeptide that begins at any one of amino acids of 24-138 of SEQ ID NO: 545 and ends at any one of amino acids 539-814 of SEQ ID NO: 545. In certain preferred embodiments, Cryptic family protein 1B:Crim2 heteromultimers are soluble. In some embodiments, a Cryptic family protein 1B:Crim2 heteromultimer of the disclosure binds to one or more TGF-beta superfamily ligands (e.g., binds to one or more TGF-beta superfamily ligands with a K_{D} of at least 1×10⁻⁷). In some embodiments, a Cryptic family protein 1B:Crim2 heteromultimer of the disclosure inhibits one or more TGF-beta superfamily ligands (e.g., inhibits Smad signaling). Heteromultimer-ligand binding and inhibition may be determined using a variety of assays including, for example, those described herein (e.g., in vitro binding and/or cell-based signaling assays). In some embodiments, a Cryptic family protein 1B:Crim2 heteromultimer of the disclosure has a different TGF-beta ligand binding and/or inhibition profile (specificity) compared to a corresponding homomultimer (e.g., Cryptic family protein 1B and Crim2 homomultimers). In some embodiments, a Cryptic family protein 1B:Crim2 heteromultimer of the disclosure is a heterodimer.

[0191] In certain aspects, the disclosure relates to heteromultimers that comprise at least one Cryptic family protein 1B polypeptide, which includes fragments, functional variants, and modified forms thereof, and at least one BAMBI polypeptide, which includes fragments, functional variants, and modified forms thereof. In some embodiments, the Cryptic family protein 1B:BAMBI heteromultimer comprises a polypeptide that is at least 70%, 75%, 80%, 85%, 90%, 91%, 92%, 93%, 94%, 95%, 95%, 96%, 97%, 98%, 99%, or 100% identical to the amino acid sequence of any one of SEQ ID NOs: 533 or 534. In some embodiments, the Cryptic family protein 1B:BAMBI heteromultimer comprises a polypeptide that is at least 70%, 75%, 80%, 85%, 90%, 91%, 92%, 93%, 94%, 95%, 95%, 96%, 97%, 98%, 99%, or 100% identical to a polypeptide that begins at any one of amino acids of 26-30 of SEQ ID NO: 533 and ends at any one of amino acids 82-223 of SEQ ID NO: 533. In some embodiments, the Cryptic family protein 1B:BAMBI heteromultimer comprises a polypeptide that is at least 70%, 75%, 80%, 85%, 90%, 91%, 92%, 93%, 94%, 95%, 95%, 96%, 97%, 98%, 99%, or 100% identical to the amino acid sequence of any one of SEQ ID NOs: 549 or 550. In some embodiments, the Cryptic family protein 1B:BAMBI heteromultimer comprises a polypeptide that is at least 70%, 75%, 80%, 85%, 90%, 91%, 92%, 93%, 94%, 95%, 95%, 96%, 97%, 98%, 99%, or 100% identical to a polypeptide that begins at any one of amino acids of 21-30 of SEQ ID NO: 549 and ends at any one of amino acids 104-152 of SEQ ID NO: 549. In certain preferred embodiments, Cryptic family protein 1B:BAMBI heteromultimers are soluble. In some embodiments, a Cryptic family protein 1B:BAMBI heteromultimer of the disclosure binds to one or more TGF-beta superfamily ligands (e.g., binds to one or more TGF-beta superfamily ligands with a K_{D} of at least 1×10⁻⁷). In some embodiments, a Cryptic family protein 1B:BAMBI heteromultimer of the disclosure inhibits one or more TGF-beta superfamily ligands (e.g., inhibits Smad signaling). Heteromultimer-ligand binding and inhibition may be determined using a variety of assays including, for example, those described herein (e.g., in vitro binding and/or cell-based signaling assays). In some embodiments, a Cryptic family protein 1B:BAMBI of the disclosure has a different TGF-beta ligand binding and/or inhibition profile (specificity) compared to a corresponding homomultimer (e.g., Cryptic family protein 1B and BAMBI homomultimers). In some embodiments, a Cryptic family protein 1B:BAMBI heteromultimer of the disclosure is a heterodimer.

[0192] In certain aspects, the disclosure relates to heteromultimers that comprise at least one Cryptic family protein 1B polypeptide, which includes fragments, functional variants, and modified forms thereof, and at least one BMPER polypeptide, which includes fragments, functional variants, and modified forms thereof. In some embodiments, the Cryptic family protein 1B:BMPER heteromultimer comprises a polypeptide that is at least 70%, 75%, 80%, 85%, 90%, 91%, 92%, 93%, 94%, 95%, 95%, 96%, 97%, 98%, 99%, or 100% identical to the amino acid sequence of any one of SEQ ID NOs: 533 or 534. In some embodiments, the Cryptic family protein 1B:BMPER heteromultimer comprises a polypeptide that is at least 70%, 75%, 80%, 85%, 90%, 91%, 92%, 93%, 94%, 95%, 95%, 96%, 97%, 98%, 99%, or 100% identical to a polypeptide that begins at any one of amino acids of 26-30 of SEQ ID NO: 533 and ends at any one of amino acids 82-223 of SEQ ID NO: 533. In some embodiments, the Cryptic family protein 1B:BMPER heteromultimer comprises a polypeptide that is at least 70%, 75%, 80%, 85%, 90%, 91%, 92%, 93%, 94%, 95%, 95%, 96%, 97%, 98%, 99%, or 100% identical to the amino acid sequence of any one of SEQ ID NOs: 553 or 554. In some embodiments, the Cryptic family protein 1B:BMPER heteromultimer comprises a polypeptide that is at least 70%, 75%, 80%, 85%, 90%, 91%, 92%, 93%, 94%, 95%, 95%, 96%, 97%, 98%, 99%, or 100% identical to a polypeptide that begins at any one of amino acids of 39-50 of SEQ ID NO: 553 and ends at any one of amino acids 364-369 of SEQ ID NO: 553. In some embodiments, the Cryptic family protein 1B:BMPER heteromultimer comprises a polypeptide that is at least 70%, 75%, 80%, 85%, 90%, 91%, 92%, 93%, 94%, 95%, 95%, 96%, 97%, 98%, 99%, or 100% identical to a polypeptide that begins at any one of amino acids of 370-386 of SEQ ID NO: 553 and ends at any one of amino acids 682-685 of SEQ ID NO: 553. In some embodiments, the Cryptic family protein 1B:BMPER heteromultimer comprises a polypeptide that is at least 70%, 75%, 80%, 85%, 90%, 91%, 92%, 93%, 94%, 95%, 95%, 96%, 97%, 98%, 99%, or 100% identical to a polypeptide that begins at any one of amino acids of 39-50 of SEQ ID NO: 553 and ends at any one of amino acids 682-685 of SEQ ID NO: 553. In some embodiments, the Cryptic family protein 1B:BMPER heteromultimer comprises a BMPER protein, wherein the BMPER protein is a dimer comprising a first polypeptide that is at least 70%, 75%, 80%, 85%, 90%, 91%, 92%, 93%, 94%, 95%, 96%, 97%, 98%, 99%, or 100% identical to a polypeptide that begins at any one of amino acids of 39-50 of SEQ ID NO: 553 and ends at any one of amino acids 364-369 of SEQ ID NO: 553, and second polypeptide that is at least 70%, 75%, 80%, 85%, 90%, 91%, 92%, 93%, 94%, 95%, 96%, 97%, 98%, 99%, or 100% identical to a polypeptide that begins at any one of amino acids of 370-386 of SEQ ID NO: 553, and ends at any one of amino acids 682-685 of SEQ ID NO: 553. In some embodiments, the Cryptic family protein 1B:BMPER heteromultimer comprises a single chain ligand trap that comprises a first BMPER polypeptide domain that is at least 70%, 75%, 80%, 85%, 90%, 91%, 92%, 93%, 94%, 95%, 96%, 97%, 98%, 99%, or 100% identical to a polypeptide that begins at any one of amino acids of 39-50 of SEQ ID NO: 553 and ends at any one of amino acids 364-369 of SEQ ID NO: 553, and second BMPER polypeptide domain that is at least 70%, 75%, 80%, 85%, 90%, 91%, 92%, 93%, 94%, 95%, 96%, 97%, 98%, 99%, or 100% identical to a polypeptide that begins at any one of amino acids of 370-386 of SEQ ID NO: 553 and ends at any one of amino acids 682-685 of SEQ ID NO: 553. In certain preferred embodiments, Cryptic family protein 1B:BMPER heteromultimers are soluble. In some embodiments, a Cryptic family protein 1B:BMPER heteromultimer of the disclosure binds to one or more TGF-beta superfamily ligands (e.g., binds to one or more TGF-beta superfamily ligands with a K_{D} of at least 1×10⁻⁷). In some embodiments, a Cryptic family protein 1B:BMPER heteromultimer of the disclosure inhibits one or more TGF-beta superfamily ligands (e.g., inhibits Smad signaling). Heteromultimer-ligand binding and inhibition may be determined using a variety of assays including, for example, those described herein (e.g., in vitro binding and/or cell-based signaling assays). In some embodiments, a Cryptic family protein 1B:BMPER heteromultimer of the disclosure has a different TGF-beta ligand binding and/or inhibition profile (specificity) compared to a corresponding homomultimer (e.g., Cryptic family protein 1B and BMPER homomultimers). In some embodiments, a Cryptic family protein 1B:BMPER heteromultimer of the disclosure is a heterodimer.

[0193] In certain aspects, the disclosure relates to heteromultimers that comprise at least one Cryptic family protein 1B polypeptide, which includes fragments, functional variants, and modified forms thereof, and at least one RGM-A polypeptide, which includes fragments, functional variants, and modified forms thereof. In some embodiments, the Cryptic family protein 1B:RGM-A heteromultimer comprises a polypeptide that is at least 70%, 75%, 80%, 85%, 90%, 91%, 92%, 93%, 94%, 95%, 95%, 96%, 97%, 98%, 99%, or 100% identical to the amino acid sequence of any one of SEQ ID NOs: 533 or 534. In some embodiments, the Cryptic family protein 1B:RGM-A heteromultimer comprises a polypeptide that is at least 70%, 75%, 80%, 85%, 90%, 91%, 92%, 93%, 94%, 95%, 95%, 96%, 97%, 98%, 99%, or 100% identical to a polypeptide that begins at any one of amino acids of 26-30 of SEQ ID NO: 533 and ends at any one of amino acids 82-223 of SEQ ID NO: 533. In some embodiments, the Cryptic family protein 1B:RGM-A heteromultimer comprises a polypeptide that is at least 70%, 75%, 80%, 85%, 90%, 91%, 92%, 93%, 94%, 95%, 95%, 96%, 97%, 98%, 99%, or 100% identical to the amino acid sequence of any one of SEQ ID NOs: 553 or 554. In some embodiments, the Cryptic family protein 1B:RGM-A heteromultimer comprises a polypeptide that is at least 70%, 75%, 80%, 85%, 90%, 91%, 92%, 93%, 94%, 95%, 95%, 96%, 97%, 98%, 99%, or 100% identical to a polypeptide that begins at any one of amino acids of 1-177 of SEQ ID NO: 561 and ends at any one of amino acids 430-458 of SEQ ID NO: 561. In some embodiments, the Cryptic family protein 1B:RGM-A heteromultimer comprises a polypeptide that is at least 70%, 75%, 80%, 85%, 90%, 91%, 92%, 93%, 94%, 95%, 95%, 96%, 97%, 98%, 99%, or 100% identical to a polypeptide that begins at any one of amino acids of 1-153 of SEQ ID NO: 565 and ends at any one of amino acids 406-434 of SEQ ID NO: 565. In some embodiments, the Cryptic family protein 1B:RGM-A heteromultimer comprises a polypeptide that is at least 70%, 75%, 80%, 85%, 90%, 91%, 92%, 93%, 94%, 95%, 95%, 96%, 97%, 98%, 99%, or 100% identical to a polypeptide that begins at any one of amino acids of 1-169 of SEQ ID NO: 569 and ends at any one of amino acids 422-450 of SEQ ID NO: 569. In certain preferred embodiments, Cryptic family protein 1B:RGM-A heteromultimers are soluble. In some embodiments, a Cryptic family protein 1B:RGM-A heteromultimer of the disclosure binds to one or more TGF-beta superfamily ligands (e.g., binds to one or more TGF-beta superfamily ligands with a K_{D} of at least 1×10⁻⁷). In some embodiments, a Cryptic family protein 1B:RGM-A heteromultimer of the disclosure inhibits one or more TGF-beta superfamily ligands (e.g., inhibits Smad signaling). Heteromultimer-ligand binding and inhibition may be determined using a variety of assays including, for example, those described herein (e.g., in vitro binding and/or cell-based signaling assays). In some embodiments, a Cryptic family protein 1B:RGM-A heteromultimer of the disclosure has a different TGF-beta ligand binding and/or inhibition profile (specificity) compared to a corresponding homomultimer (e.g., Cryptic family protein 1B and RGM-A homomultimers). In some embodiments, a Cryptic family protein 1B:RGM-A heteromultimer of the disclosure is a heterodimer.

[0194] In certain aspects, the disclosure relates to heteromultimers that comprise at least one Cryptic family protein 1B polypeptide, which includes fragments, functional variants, and modified forms thereof, and at least one RGM-B polypeptide, which includes fragments, functional variants, and modified forms thereof. In some embodiments, the Cryptic family protein 1B:RGM-B heteromultimer comprises a polypeptide that is at least 70%, 75%, 80%, 85%, 90%, 91%, 92%, 93%, 94%, 95%, 95%, 96%, 97%, 98%, 99%, or 100% identical to the amino acid sequence of any one of SEQ ID NOs: 533 or 534. In some embodiments, the Cryptic family protein 1B:RGM-B heteromultimer comprises a polypeptide that is at least 70%, 75%, 80%, 85%, 90%, 91%, 92%, 93%, 94%, 95%, 95%, 96%, 97%, 98%, 99%, or 100% identical to a polypeptide that begins at any one of amino acids of 26-30 of SEQ ID NO: 533 and ends at any one of amino acids 82-223 of SEQ ID NO: 533. In some embodiments, the Cryptic family protein 1B:RGM-B heteromultimer comprises a polypeptide that is at least 70%, 75%, 80%, 85%, 90%, 91%, 92%, 93%, 94%, 95%, 95%, 96%, 97%, 98%, 99%, or 100% identical to the amino acid sequence of any one of SEQ ID NOs: 557 or 558. In some embodiments, the Cryptic family protein 1B:RGM-B heteromultimer comprises a polypeptide that is at least 70%, 75%, 80%, 85%, 90%, 91%, 92%, 93%, 94%, 95%, 95%, 96%, 97%, 98%, 99%, or 100% identical to a polypeptide that begins at any one of amino acids of 1-87 of SEQ ID NO: 557 and ends at any one of amino acids 452-478 of SEQ ID NO: 557. In some embodiments, the Cryptic family protein 1B:RGM-B heteromultimer comprises a polypeptide that is at least 70%, 75%, 80%, 85%, 90%, 91%, 92%, 93%, 94%, 95%, 95%, 96%, 97%, 98%, 99%, or 100% identical to a polypeptide that begins at any one of amino acids of 210-222 of SEQ ID NO: 557 and ends at any one of amino acids 413-452 of SEQ ID NO: 557. In some embodiments, the Cryptic family protein 1B:RGM-B heteromultimer comprises a polypeptide that is at least 70%, 75%, 80%, 85%, 90%, 91%, 92%, 93%, 94%, 95%, 95%, 96%, 97%, 98%, 99%, or 100% identical to a polypeptide that begins at any one of amino acids of 87-95 of SEQ ID NO: 557 and ends at any one of amino acids 204-209 of SEQ ID NO: 557. In some embodiments, the Cryptic family protein 1B:RGM-B heteromultimer comprises a RGM-B protein, wherein the RGM-B protein is a dimer comprising a first polypeptide that is at least 70%, 75%, 80%, 85%, 90%, 91%, 92%, 93%, 94%, 95%, 96%, 97%, 98%, 99%, or 100% identical to a polypeptide that begins at any one of amino acids of 87-95 of SEQ ID NO: 557 and ends at any one of amino acids 204-209 of SEQ ID NO: 557 and second polypeptide that is at least 70%, 75%, 80%, 85%, 90%, 91%, 92%, 93%, 94%, 95%, 96%, 97%, 98%, 99%, or 100% identical to a polypeptide that begins at any one of amino acids of 210-222 of SEQ ID NO: 557 and ends at any one of amino acids 413-452 of SEQ ID NO: 557. In some embodiments, the Cryptic family protein 1B:RGM-B heteromultimer comprises a single chain ligand trap that comprises a first RGM-B polypeptide domain that is at least 70%, 75%, 80%, 85%, 90%, 91%, 92%, 93%, 94%, 95%, 96%, 97%, 98%, 99%, or 100% identical to a polypeptide that begins at any one of amino acids of 87-95 of SEQ ID NO: 557 and ends at any one of amino acids 204-209 of SEQ ID NO: 557 and second RGM-B polypeptide domain that is at least 70%, 75%, 80%, 85%, 90%, 91%, 92%, 93%, 94%, 95%, 96%, 97%, 98%, 99%, or 100% identical to a polypeptide that begins at any one of amino acids of 210-222 of SEQ ID NO: 557 and ends at any one of amino acids 413-452 of SEQ ID NO: 557. In certain preferred embodiments, Cryptic family protein 1B:RGM-B heteromultimers are soluble. In some embodiments, a Cryptic family protein 1B:RGM-B heteromultimer of the disclosure binds to one or more TGF-beta superfamily ligands (e.g., binds to one or more TGF-beta superfamily ligands with a K_{D} of at least 1×10⁻⁷). In some embodiments, a Cryptic family protein 1B:RGM-B heteromultimer of the disclosure inhibits one or more TGF-beta superfamily ligands (e.g., inhibits Smad signaling). Heteromultimer-ligand binding and inhibition may be determined using a variety of assays including, for example, those described herein (e.g., in vitro binding and/or cell-based signaling assays). In some embodiments, a Cryptic family protein 1B:RGM-B heteromultimer of the disclosure has a different TGF-beta ligand binding and/or inhibition profile (specificity) compared to a corresponding homomultimer (e.g., Cryptic family protein 1B and RGM-B homomultimers). In some embodiments, a Cryptic family protein 1B:RGM-B of the disclosure is a heterodimer.

[0195] In certain aspects, the disclosure relates to heteromultimers that comprise at least one Cryptic family protein 1B polypeptide, which includes fragments, functional variants, and modified forms thereof, and at least one hemojuvelin polypeptide, which includes fragments, functional variants, and modified forms thereof. In some embodiments, the Cryptic family protein 1B:hemojuvelin heteromultimer comprises a polypeptide that is at least 70%, 75%, 80%, 85%, 90%, 91%, 92%, 93%, 94%, 95%, 95%, 96%, 97%, 98%, 99%, or 100% identical to the amino acid sequence of any one of SEQ ID NOs: 533 or 534. In some embodiments, the Cryptic family protein 1B:hemojuvelin heteromultimer comprises a polypeptide that is at least 70%, 75%, 80%, 85%, 90%, 91%, 92%, 93%, 94%, 95%, 95%, 96%, 97%, 98%, 99%, or 100% identical to a polypeptide that begins at any one of amino acids of 26-30 of SEQ ID NO: 533 and ends at any one of amino acids 82-223 of SEQ ID NO: 533. In some embodiments, the Cryptic family protein 1B:hemojuvelin heteromultimer comprises a polypeptide that is at least 70%, 75%, 80%, 85%, 90%, 91%, 92%, 93%, 94%, 95%, 95%, 96%, 97%, 98%, 99%, or 100% identical to the amino acid sequence of any one of SEQ ID NOs: 573, 574, 577, 578, 581, or 582. In some embodiments, the Cryptic family protein 1B:hemojuvelin heteromultimer comprises a polypeptide that is at least 70%, 75%, 80%, 85%, 90%, 91%, 92%, 93%, 94%, 95%, 95%, 96%, 97%, 98%, 99%, or 100% identical to a polypeptide that begins at any one of amino acids of 1-36 of SEQ ID NO: 573 and ends at any one of amino acids 400-426 of SEQ ID NO: 573. In some embodiments, the Cryptic family protein 1B:hemojuvelin heteromultimer comprises a polypeptide that is at least 70%, 75%, 80%, 85%, 90%, 91%, 92%, 93%, 94%, 95%, 95%, 96%, 97%, 98%, 99%, or 100% identical to a polypeptide that begins at any one of amino acids of 36-42 of SEQ ID NO: 573 and ends at any one of amino acids 167-172 of SEQ ID NO: 573. In some embodiments, the Cryptic family protein 1B:hemojuvelin heteromultimer comprises a polypeptide that is at least 70%, 75%, 80%, 85%, 90%, 91%, 92%, 93%, 94%, 95%, 95%, 96%, 97%, 98%, 99%, or 100% identical to a polypeptide that begins at any one of amino acids of 173-185 of SEQ ID NO: 573 and ends at any one of amino acids 361-400 of SEQ ID NO: 573. In some embodiments, the Cryptic family protein 1B:hemojuvelin heteromultimer comprises a hemojuvelin protein that is a dimer comprising a first polypeptide that is at least 70%, 75%, 80%, 85%, 90%, 91%, 92%, 93%, 94%, 95%, 96%, 97%, 98%, 99%, or 100% identical to a polypeptide that begins at any one of amino acids of 36-42 of SEQ ID NO: 573, and ends at any one of amino acids 167-172 of SEQ ID NO: 573 and second polypeptide that is at least 70%, 75%, 80%, 85%, 90%, 91%, 92%, 93%, 94%, 95%, 96%, 97%, 98%, 99%, or 100% identical to a polypeptide that begins at any one of amino acids of 173-185 of SEQ ID NO: 573 and ends at any one of amino acids 361-400 of SEQ ID NO: 573. In some embodiments, the Cryptic family protein 1B:hemojuvelin heteromultimer comprises a single chain ligand trap that comprises a first hemojuvelin polypeptide domain that is at least 70%, 75%, 80%, 85%, 90%, 91%, 92%, 93%, 94%, 95%, 96%, 97%, 98%, 99%, or 100% identical to a polypeptide that begins at any one of amino acids of 36-42 of SEQ ID NO: 573 and ends at any one of amino acids 167-172 of SEQ ID NO: 573 and second hemojuvelin polypeptide domain that is at least 70%, 75%, 80%, 85%, 90%, 91%, 92%, 93%, 94%, 95%, 96%, 97%, 98%, 99%, or 100% identical to a polypeptide that begins at any one of amino acids of 173-185 of SEQ ID NO: 573 and ends at any one of amino acids 361-400 of SEQ ID NO: 573. In some embodiments, the Cryptic family protein 1B:hemojuvelin heteromultimer comprises a polypeptide that is at least 70%, 75%, 80%, 85%, 90%, 91%, 92%, 93%, 94%, 95%, 95%, 96%, 97%, 98%, 99%, or 100% identical to a polypeptide that begins at any one of amino acids of 1-6 of SEQ ID NO: 577 and ends at any one of amino acids 287-313 of SEQ ID NO: 577. In some embodiments, the Cryptic family protein 1B:hemojuvelin heteromultimer comprises a polypeptide that is at least 70%, 75%, 80%, 85%, 90%, 91%, 92%, 93%, 94%, 95%, 95%, 96%, 97%, 98%, 99%, or 100% identical to a polypeptide that begins at any one of amino acids of 1-6 of SEQ ID NO: 577 and ends at any one of amino acids 54-59 of SEQ ID NO: 577. In some embodiments, the Cryptic family protein 1B:hemojuvelin heteromultimer comprises a polypeptide that is at least 70%, 75%, 80%, 85%, 90%, 91%, 92%, 93%, 94%, 95%, 95%, 96%, 97%, 98%, 99%, or 100% identical to a polypeptide that begins at any one of amino acids of 60-72 of SEQ ID NO: 577 and ends at any one of amino acids 248-287 of SEQ ID NO: 577. In some embodiments, the Cryptic family protein 1B:hemojuvelin heteromultimer comprises a hemojuvelin protein, wherein the hemojuvelin protein is a dimer comprising a first polypeptide that is at least 70%, 75%, 80%, 85%, 90%, 91%, 92%, 93%, 94%, 95%, 96%, 97%, 98%, 99%, or 100% identical to a polypeptide that begins at any one of amino acids of 1-6 of SEQ ID NO: 577 and ends at any one of amino acids 54-59 of SEQ ID NO: 577, and second polypeptide that is at least 70%, 75%, 80%, 85%, 90%, 91%, 92%, 93%, 94%, 95%, 96%, 97%, 98%, 99%, or 100% identical to a polypeptide that begins at any one of amino acids of 60-72 of SEQ ID NO: 577 and ends at any one of amino acids 248-287 of SEQ ID NO: 577. In some embodiments, the Cryptic family protein 1B:hemojuvelin heteromultimer comprises a single chain ligand trap that comprises a first hemojuvelin polypeptide domain that is at least 70%, 75%, 80%, 85%, 90%, 91%, 92%, 93%, 94%, 95%, 96%, 97%, 98%, 99%, or 100% identical to a polypeptide that begins at any one of amino acids of 1-6 of SEQ ID NO: 577 and ends at any one of amino acids 54-59 of SEQ ID NO: 577, and second hemojuvelin polypeptide domain that is at least 70%, 75%, 80%, 85%, 90%, 91%, 92%, 93%, 94%, 95%, 96%, 97%, 98%, 99%, or 100% identical to a polypeptide that begins at any one of amino acids of 60-72 of SEQ ID NO: 577, and ends at any one of amino acids 248-287 of SEQ ID NO: 577. In some embodiments, the Cryptic family protein 1B:hemojuvelin heteromultimer comprises a polypeptide that is at least 70%, 75%, 80%, 85%, 90%, 91%, 92%, 93%, 94%, 95%, 95%, 96%, 97%, 98%, 99%, or 100% identical to a polypeptide that begins at any one of amino acids of 1-4 of SEQ ID NO: 581 and ends at any one of amino acids 135-200 of SEQ ID NO: 581. In certain preferred embodiments, Cryptic family protein 1B:hemojuvelin heteromultimers are soluble. In some embodiments, a Cryptic family protein 1B:hemojuvelin heteromultimer of the disclosure binds to one or more TGF-beta superfamily ligands (e.g., binds to one or more TGF-beta superfamily ligands with a K_{D} of at least 1×10⁻⁷). In some embodiments, a Cryptic family protein 1B:hemojuvelin heteromultimer of the disclosure inhibits one or more TGF-beta superfamily ligands (e.g., inhibits Smad signaling). Heteromultimer-ligand binding and inhibition may be determined using a variety of assays including, for example, those described herein (e.g., in vitro binding and/or cell-based signaling assays). In some embodiments, a Cryptic family protein 1B:hemojuvelin heteromultimer of the disclosure has a different TGF-beta ligand binding and/or inhibition profile (specificity) compared to a corresponding homomultimer (e.g., Cryptic family protein 1B and hemojuvelin homomultimers). In some embodiments, a Cryptic family protein 1B:hemojuvelin heteromultimer of the disclosure is a heterodimer.

[0196] In certain aspects, the disclosure relates to heteromultimers that comprise at least one Crim1 polypeptide, which includes fragments, functional variants, and modified forms thereof, and at least one Crim2 polypeptide, which includes fragments, functional variants, and modified forms thereof. In some embodiments, the Crim1:Crim2 heteromultimer comprises a polypeptide that is at least 70%, 75%, 80%, 85%, 90%, 91%, 92%, 93%, 94%, 95%, 95%, 96%, 97%, 98%, 99%, or 100% identical to the amino acid sequence of any one of SEQ ID NOs: 537 or 538. In some embodiments, the Crim1:Crim2 heteromultimer comprises a polypeptide that is at least 70%, 75%, 80%, 85%, 90%, 91%, 92%, 93%, 94%, 95%, 95%, 96%, 97%, 98%, 99%, or 100% identical to a polypeptide that begins at any one of amino acids of 35-37 of SEQ ID NO: 537 and ends at any one of amino acids 873-939 of SEQ ID NO: 537. In some embodiments, the Crim1:Crim2 heteromultimer comprises a polypeptide that is at least 70%, 75%, 80%, 85%, 90%, 91%, 92%, 93%, 94%, 95%, 95%, 96%, 97%, 98%, 99%, or 100% identical to the amino acid sequence of any one of SEQ ID NOs: 541, 542, 545, or 546. In some embodiments, the Crim1:Crim2 heteromultimer comprises a polypeptide that is at least 70%, 75%, 80%, 85%, 90%, 91%, 92%, 93%, 94%, 95%, 95%, 96%, 97%, 98%, 99%, or 100% identical to a polypeptide that begins at any one of amino acids of 26-138 of SEQ ID NO: 541 and ends at any one of amino acids 1298-1503 of SEQ ID NO: 541. In some embodiments, the Crim1:Crim2 heteromultimer comprises a polypeptide that is at least 70%, 75%, 80%, 85%, 90%, 91%, 92%, 93%, 94%, 95%, 95%, 96%, 97%, 98%, 99%, or 100% identical to a polypeptide that begins at any one of amino acids of 24-138 of SEQ ID NO: 545 and ends at any one of amino acids 539-814 of SEQ ID NO: 545. In certain preferred embodiments, Crim1:Crim2 heteromultimers are soluble. In some embodiments, a Crim1:Crim2 heteromultimer of the disclosure binds to one or more TGF-beta superfamily ligands (e.g., binds to one or more TGF-beta superfamily ligands with a K_{D} of at least 1×10⁻⁷). In some embodiments, a Crim1:Crim2 heteromultimer of the disclosure inhibits one or more TGF-beta superfamily ligands (e.g., inhibits Smad signaling). Heteromultimer-ligand binding and inhibition may be determined using a variety of assays including, for example, those described herein (e.g., in vitro binding and/or cell-based signaling assays). In some embodiments, a Crim1:Crim2 heteromultimer of the disclosure has a different TGF-beta ligand binding and/or inhibition profile (specificity) compared to a corresponding homomultimer (e.g., Crim1 and Crim2 homomultimers). In some embodiments, a Crim1:Crim2 heteromultimer of the disclosure is a heterodimer.

[0197] In certain aspects, the disclosure relates to heteromultimers that comprise at least one Crim1 polypeptide, which includes fragments, functional variants, and modified forms thereof, and at least one BAMBI polypeptide, which includes fragments, functional variants, and modified forms thereof.

[0198] In some embodiments, the Crim1:BAMBI heteromultimer comprises a polypeptide that is at least 70%, 75%, 80%, 85%, 90%, 91%, 92%, 93%, 94%, 95%, 95%, 96%, 97%, 98%, 99%, or 100% identical to the amino acid sequence of any one of SEQ ID NOs: 537 or 538. In some embodiments, the Crim1:BAMBI heteromultimer comprises a polypeptide that is at least 70%, 75%, 80%, 85%, 90%, 91%, 92%, 93%, 94%, 95%, 95%, 96%, 97%, 98%, 99%, or 100% identical to a polypeptide that begins at any one of amino acids of 35-37 of SEQ ID NO: 537 and ends at any one of amino acids 873-939 of SEQ ID NO: 537. In some embodiments, the Crim1:BAMBI heteromultimer comprises a polypeptide that is at least 70%, 75%, 80%, 85%, 90%, 91%, 92%, 93%, 94%, 95%, 95%, 96%, 97%, 98%, 99%, or 100% identical to the amino acid sequence of any one of SEQ ID NOs: 549 or 550. In some embodiments, the Crim1:BAMBI heteromultimer comprises a polypeptide that is at least 70%, 75%, 80%, 85%, 90%, 91%, 92%, 93%, 94%, 95%, 95%, 96%, 97%, 98%, 99%, or 100% identical to a polypeptide that begins at any one of amino acids of 21-30 of SEQ ID NO: 549 and ends at any one of amino acids 104-152 of SEQ ID NO: 549. In certain preferred embodiments, Crim1:BAMBI heteromultimers are soluble. In some embodiments, a Crim1:BAMBI heteromultimer of the disclosure binds to one or more TGF-beta superfamily ligands (e.g., binds to one or more TGF-beta superfamily ligands with a K_{D} of at least 1×10⁻⁷). In some embodiments, a Crim1:BAMBI heteromultimer of the disclosure inhibits one or more TGF-beta superfamily ligands (e.g., inhibits Smad signaling). Heteromultimer-ligand binding and inhibition may be determined using a variety of assays including, for example, those described herein (e.g., in vitro binding and/or cell-based signaling assays). In some embodiments, a Crim1:BAMBI heteromultimer of the disclosure has a different TGF-beta ligand binding and/or inhibition profile (specificity) compared to a corresponding homomultimer (e.g., Crim1 and BAMBI homomultimers). In some embodiments, a Crim1:BAMBI heteromultimer of the disclosure is a heterodimer.

[0199] In certain aspects, the disclosure relates to heteromultimers that comprise at least one Crim1 polypeptide, which includes fragments, functional variants, and modified forms thereof, and at least one BMPER polypeptide, which includes fragments, functional variants, and modified forms thereof. In some embodiments, the Crim1:BMPER heteromultimer comprises a polypeptide that is at least 70%, 75%, 80%, 85%, 90%, 91%, 92%, 93%, 94%, 95%, 95%, 96%, 97%, 98%, 99%, or 100% identical to the amino acid sequence of any one of SEQ ID NOs: 537 or 538. In some embodiments, the Crim1:BMPER heteromultimer comprises a polypeptide that is at least 70%, 75%, 80%, 85%, 90%, 91%, 92%, 93%, 94%, 95%, 95%, 96%, 97%, 98%, 99%, or 100% identical to a polypeptide that begins at any one of amino acids of 35-37 of SEQ ID NO: 537 and ends at any one of amino acids 873-939 of SEQ ID NO: 537. In some embodiments, the Crim1:BMPER heteromultimer comprises a polypeptide that is at least 70%, 75%, 80%, 85%, 90%, 91%, 92%, 93%, 94%, 95%, 95%, 96%, 97%, 98%, 99%, or 100% identical to the amino acid sequence of any one of SEQ ID NOs: 553 or 554. In some embodiments, the Crim1:BMPER heteromultimer comprises a polypeptide that is at least 70%, 75%, 80%, 85%, 90%, 91%, 92%, 93%, 94%, 95%, 95%, 96%, 97%, 98%, 99%, or 100% identical to a polypeptide that begins at any one of amino acids of 39-50 of SEQ ID NO: 553 and ends at any one of amino acids 364-369 of SEQ ID NO: 553. In some embodiments, the Crim1:BMPER heteromultimer comprises a polypeptide that is at least 70%, 75%, 80%, 85%, 90%, 91%, 92%, 93%, 94%, 95%, 95%, 96%, 97%, 98%, 99%, or 100% identical to a polypeptide that begins at any one of amino acids of 370-386 of SEQ ID NO: 553 and ends at any one of amino acids 682-685 of SEQ ID NO: 553. In some embodiments, the Crim1:BMPER heteromultimer comprises a polypeptide that is at least 70%, 75%, 80%, 85%, 90%, 91%, 92%, 93%, 94%, 95%, 95%, 96%, 97%, 98%, 99%, or 100% identical to a polypeptide that begins at any one of amino acids of 39-50 of SEQ ID NO: 553 and ends at any one of amino acids 682-685 of SEQ ID NO: 553. In some embodiments, the Crim1:BMPER heteromultimer comprises a BMPER protein, wherein the BMPER protein is a dimer comprising a first polypeptide that is at least 70%, 75%, 80%, 85%, 90%, 91%, 92%, 93%, 94%, 95%, 96%, 97%, 98%, 99%, or 100% identical to a polypeptide that begins at any one of amino acids of 39-50 of SEQ ID NO: 553 and ends at any one of amino acids 364-369 of SEQ ID NO: 553, and second polypeptide that is at least 70%, 75%, 80%, 85%, 90%, 91%, 92%, 93%, 94%, 95%, 96%, 97%, 98%, 99%, or 100% identical to a polypeptide that begins at any one of amino acids of 370-386 of SEQ ID NO: 553, and ends at any one of amino acids 682-685 of SEQ ID NO: 553. In some embodiments, the Crim1:BMPER heteromultimer comprises a single chain ligand trap that comprises a first BMPER polypeptide domain that is at least 70%, 75%, 80%, 85%, 90%, 91%, 92%, 93%, 94%, 95%, 96%, 97%, 98%, 99%, or 100% identical to a polypeptide that begins at any one of amino acids of 39-50 of SEQ ID NO: 553 and ends at any one of amino acids 364-369 of SEQ ID NO: 553, and second BMPER polypeptide domain that is at least 70%, 75%, 80%, 85%, 90%, 91%, 92%, 93%, 94%, 95%, 96%, 97%, 98%, 99%, or 100% identical to a polypeptide that begins at any one of amino acids of 370-386 of SEQ ID NO: 553 and ends at any one of amino acids 682-685 of SEQ ID NO: 553. In certain preferred embodiments, Crim1:BMPER heteromultimers are soluble. In some embodiments, a Crim1:BMPER heteromultimer of the disclosure binds to one or more TGF-beta superfamily ligands (e.g., binds to one or more TGF-beta superfamily ligands with a K_{D} of at least 1×10⁻⁷). In some embodiments, a Crim1:BMPER heteromultimer of the disclosure inhibits one or more TGF-beta superfamily ligands (e.g., inhibits Smad signaling). Heteromultimer-ligand binding and inhibition may be determined using a variety of assays including, for example, those described herein (e.g., in vitro binding and/or cell-based signaling assays). In some embodiments, a Crim1:BMPER heteromultimer of the disclosure has a different TGF-beta ligand binding and/or inhibition profile (specificity) compared to a corresponding homomultimer (e.g., Crim1 and BMPER homomultimers). In some embodiments, a Crim1:BMPER heteromultimer of the disclosure is a heterodimer.

[0200] In certain aspects, the disclosure relates to heteromultimers that comprise at least one Crim1 polypeptide, which includes fragments, functional variants, and modified forms thereof, and at least one RGM-A polypeptide, which includes fragments, functional variants, and modified forms thereof. In some embodiments, the Crim1:RGM-A heteromultimer comprises a polypeptide that is at least 70%, 75%, 80%, 85%, 90%, 91%, 92%, 93%, 94%, 95%, 95%, 96%, 97%, 98%, 99%, or 100% identical to the amino acid sequence of any one of SEQ ID NOs: 537 or 538. In some embodiments, the Crim1:RGM-A heteromultimer comprises a polypeptide that is at least 70%, 75%, 80%, 85%, 90%, 91%, 92%, 93%, 94%, 95%, 95%, 96%, 97%, 98%, 99%, or 100% identical to a polypeptide that begins at any one of amino acids of 35-37 of SEQ ID NO: 537 and ends at any one of amino acids 873-939 of SEQ ID NO: 537. In some embodiments, the Crim1:RGM-A heteromultimer comprises a polypeptide that is at least 70%, 75%, 80%, 85%, 90%, 91%, 92%, 93%, 94%, 95%, 95%, 96%, 97%, 98%, 99%, or 100% identical to the amino acid sequence of any one of SEQ ID NOs: 553 or 554. In some embodiments, the Crim1:RGM-A heteromultimer comprises a polypeptide that is at least 70%, 75%, 80%, 85%, 90%, 91%, 92%, 93%, 94%, 95%, 95%, 96%, 97%, 98%, 99%, or 100% identical to a polypeptide that begins at any one of amino acids of 1-177 of SEQ ID NO: 561 and ends at any one of amino acids 430-458 of SEQ ID NO: 561. In some embodiments, the Crim1:RGM-A heteromultimer comprises a polypeptide that is at least 70%, 75%, 80%, 85%, 90%, 91%, 92%, 93%, 94%, 95%, 95%, 96%, 97%, 98%, 99%, or 100% identical to a polypeptide that begins at any one of amino acids of 1-153 of SEQ ID NO: 565 and ends at any one of amino acids 406-434 of SEQ ID NO: 565. In some embodiments, the Crim1:RGM-A heteromultimer comprises a polypeptide that is at least 70%, 75%, 80%, 85%, 90%, 91%, 92%, 93%, 94%, 95%, 95%, 96%, 97%, 98%, 99%, or 100% identical to a polypeptide that begins at any one of amino acids of 1-169 of SEQ ID NO: 569 and ends at any one of amino acids 422-450 of SEQ ID NO: 569. In certain preferred embodiments, Crim1:RGM-A heteromultimers are soluble. In some embodiments, a Crim1:RGM-A heteromultimer of the disclosure binds to one or more TGF-beta superfamily ligands (e.g., binds to one or more TGF-beta superfamily ligands with a K_{D} of at least 1×10⁻⁷). In some embodiments, a Crim1:RGM-A heteromultimer of the disclosure inhibits one or more TGF-beta superfamily ligands (e.g., inhibits Smad signaling). Heteromultimer-ligand binding and inhibition may be determined using a variety of assays including, for example, those described herein (e.g., in vitro binding and/or cell-based signaling assays). In some embodiments, a Crim1:RGM-A heteromultimer of the disclosure has a different TGF-beta ligand binding and/or inhibition profile (specificity) compared to a corresponding homomultimer (e.g., Crim1 and RGM-A homomultimers). In some embodiments, a Crim1:RGM-A heteromultimer of the disclosure is a heterodimer.

[0201] In certain aspects, the disclosure relates to heteromultimers that comprise at least one Crim1 polypeptide, which includes fragments, functional variants, and modified forms thereof, and at least one RGM-B polypeptide, which includes fragments, functional variants, and modified forms thereof. In some embodiments, the Crim1:RGM-B heteromultimer comprises a polypeptide that is at least 70%, 75%, 80%, 85%, 90%, 91%, 92%, 93%, 94%, 95%, 95%, 96%, 97%, 98%, 99%, or 100% identical to the amino acid sequence of any one of SEQ ID NOs: 537 or 538. In some embodiments, the Crim1:RGM-B heteromultimer comprises a polypeptide that is at least 70%, 75%, 80%, 85%, 90%, 91%, 92%, 93%, 94%, 95%, 95%, 96%, 97%, 98%, 99%, or 100% identical to a polypeptide that begins at any one of amino acids of 35-37 of SEQ ID NO: 537 and ends at any one of amino acids 873-939 of SEQ ID NO: 537. In some embodiments, the Crim1:RGM-B heteromultimer comprises a polypeptide that is at least 70%, 75%, 80%, 85%, 90%, 91%, 92%, 93%, 94%, 95%, 95%, 96%, 97%, 98%, 99%, or 100% identical to the amino acid sequence of any one of SEQ ID NOs: 557 or 558. In some embodiments, the Crim1:RGM-B heteromultimer comprises a polypeptide that is at least 70%, 75%, 80%, 85%, 90%, 91%, 92%, 93%, 94%, 95%, 95%, 96%, 97%, 98%, 99%, or 100% identical to a polypeptide that begins at any one of amino acids of 1-87 of SEQ ID NO: 557 and ends at any one of amino acids 452-478 of SEQ ID NO: 557. In some embodiments, the Crim1:RGM-B heteromultimer comprises a polypeptide that is at least 70%, 75%, 80%, 85%, 90%, 91%, 92%, 93%, 94%, 95%, 95%, 96%, 97%, 98%, 99%, or 100% identical to a polypeptide that begins at any one of amino acids of 210-222 of SEQ ID NO: 557 and ends at any one of amino acids 413-452 of SEQ ID NO: 557. In some embodiments, the Crim1:RGM-B heteromultimer comprises a polypeptide that is at least 70%, 75%, 80%, 85%, 90%, 91%, 92%, 93%, 94%, 95%, 95%, 96%, 97%, 98%, 99%, or 100% identical to a polypeptide that begins at any one of amino acids of 87-95 of SEQ ID NO: 557 and ends at any one of amino acids 204-209 of SEQ ID NO: 557. In some embodiments, the Crim1:RGM-B heteromultimer comprises a RGM-B protein, wherein the RGM-B protein is a dimer comprising a first polypeptide that is at least 70%, 75%, 80%, 85%, 90%, 91%, 92%, 93%, 94%, 95%, 96%, 97%, 98%, 99%, or 100% identical to a polypeptide that begins at any one of amino acids of 87-95 of SEQ ID NO: 557 and ends at any one of amino acids 204-209 of SEQ ID NO: 557 and second polypeptide that is at least 70%, 75%, 80%, 85%, 90%, 91%, 92%, 93%, 94%, 95%, 96%, 97%, 98%, 99%, or 100% identical to a polypeptide that begins at any one of amino acids of 210-222 of SEQ ID NO: 557 and ends at any one of amino acids 413-452 of SEQ ID NO: 557. In some embodiments, the Crim1:RGM-B heteromultimer comprises a single chain ligand trap that comprises a first RGM-B polypeptide domain that is at least 70%, 75%, 80%, 85%, 90%, 91%, 92%, 93%, 94%, 95%, 96%, 97%, 98%, 99%, or 100% identical to a polypeptide that begins at any one of amino acids of 87-95 of SEQ ID NO: 557 and ends at any one of amino acids 204-209 of SEQ ID NO: 557 and second RGM-B polypeptide domain that is at least 70%, 75%, 80%, 85%, 90%, 91%, 92%, 93%, 94%, 95%, 96%, 97%, 98%, 99%, or 100% identical to a polypeptide that begins at any one of amino acids of 210-222 of SEQ ID NO: 557 and ends at any one of amino acids 413-452 of SEQ ID NO: 557. In certain preferred embodiments, Crim1:RGM-B heteromultimers are soluble. In some embodiments, a Crim1:RGM-B heteromultimer of the disclosure binds to one or more TGF-beta superfamily ligands (e.g., binds to one or more TGF-beta superfamily ligands with a K_{D} of at least 1×10⁻⁷). In some embodiments, a Crim1:RGM-B heteromultimer of the disclosure inhibits one or more TGF-beta superfamily ligands (e.g., inhibits Smad signaling). Heteromultimer-ligand binding and inhibition may be determined using a variety of assays including, for example, those described herein (e.g., in vitro binding and/or cell-based signaling assays). In some embodiments, a Crim1:RGM-B heteromultimer of the disclosure has a different TGF-beta ligand binding and/or inhibition profile (specificity) compared to a corresponding homomultimer (e.g., Crim1 and RGM-B homomultimers). In some embodiments, a Crim1:RGM-B heteromultimer of the disclosure is a heterodimer.

[0202] In certain aspects, the disclosure relates to heteromultimers that comprise at least one Crim1 polypeptide, which includes fragments, functional variants, and modified forms thereof, and at least one hemojuvelin polypeptide, which includes fragments, functional variants, and modified forms thereof. In some embodiments, the Crim1:hemojuvelin heteromultimer comprises a polypeptide that is at least 70%, 75%, 80%, 85%, 90%, 91%, 92%, 93%, 94%, 95%, 95%, 96%, 97%, 98%, 99%, or 100% identical to the amino acid sequence of any one of SEQ ID NOs: 537 or 538. In some embodiments, the Crim1:hemojuvelin heteromultimer comprises a polypeptide that is at least 70%, 75%, 80%, 85%, 90%, 91%, 92%, 93%, 94%, 95%, 95%, 96%, 97%, 98%, 99%, or 100% identical to a polypeptide that begins at any one of amino acids of 35-37 of SEQ ID NO: 537 and ends at any one of amino acids 873-939 of SEQ ID NO: 537. In some embodiments, the Crim1:hemojuvelin heteromultimer comprises a polypeptide that is at least 70%, 75%, 80%, 85%, 90%, 91%, 92%, 93%, 94%, 95%, 95%, 96%, 97%, 98%, 99%, or 100% identical to the amino acid sequence of any one of SEQ ID NOs: 573, 574, 577, 578, 581, or 582. In some embodiments, the Crim1:hemojuvelin heteromultimer comprises a polypeptide that is at least 70%, 75%, 80%, 85%, 90%, 91%, 92%, 93%, 94%, 95%, 95%, 96%, 97%, 98%, 99%, or 100% identical to a polypeptide that begins at any one of amino acids of 1-36 of SEQ ID NO: 573 and ends at any one of amino acids 400-426 of SEQ ID NO: 573. In some embodiments, the Crim1:hemojuvelin heteromultimer comprises a polypeptide that is at least 70%, 75%, 80%, 85%, 90%, 91%, 92%, 93%, 94%, 95%, 95%, 96%, 97%, 98%, 99%, or 100% identical to a polypeptide that begins at any one of amino acids of 36-42 of SEQ ID NO: 573 and ends at any one of amino acids 167-172 of SEQ ID NO: 573. In some embodiments, the Crim1:hemojuvelin heteromultimer comprises a polypeptide that is at least 70%, 75%, 80%, 85%, 90%, 91%, 92%, 93%, 94%, 95%, 95%, 96%, 97%, 98%, 99%, or 100% identical to a polypeptide that begins at any one of amino acids of 173-185 of SEQ ID NO: 573 and ends at any one of amino acids 361-400 of SEQ ID NO: 573. In some embodiments, the Crim1:hemojuvelin heteromultimer comprises a hemojuvelin protein that is a dimer comprising a first polypeptide that is at least 70%, 75%, 80%, 85%, 90%, 91%, 92%, 93%, 94%, 95%, 96%, 97%, 98%, 99%, or 100% identical to a polypeptide that begins at any one of amino acids of 36-42 of SEQ ID NO: 573, and ends at any one of amino acids 167-172 of SEQ ID NO: 573 and second polypeptide that is at least 70%, 75%, 80%, 85%, 90%, 91%, 92%, 93%, 94%, 95%, 96%, 97%, 98%, 99%, or 100% identical to a polypeptide that begins at any one of amino acids of 173-185 of SEQ ID NO: 573 and ends at any one of amino acids 361-400 of SEQ ID NO: 573. In some embodiments, the Crim1:hemojuvelin heteromultimer comprises a single chain ligand trap that comprises a first hemojuvelin polypeptide domain that is at least 70%, 75%, 80%, 85%, 90%, 91%, 92%, 93%, 94%, 95%, 96%, 97%, 98%, 99%, or 100% identical to a polypeptide that begins at any one of amino acids of 36-42 of SEQ ID NO: 573 and ends at any one of amino acids 167-172 of SEQ ID NO: 573 and second hemojuvelin polypeptide domain that is at least 70%, 75%, 80%, 85%, 90%, 91%, 92%, 93%, 94%, 95%, 96%, 97%, 98%, 99%, or 100% identical to a polypeptide that begins at any one of amino acids of 173-185 of SEQ ID NO: 573 and ends at any one of amino acids 361-400 of SEQ ID NO: 573. In some embodiments, the Crim1:hemojuvelin heteromultimer comprises a polypeptide that is at least 70%, 75%, 80%, 85%, 90%, 91%, 92%, 93%, 94%, 95%, 95%, 96%, 97%, 98%, 99%, or 100% identical to a polypeptide that begins at any one of amino acids of 1-6 of SEQ ID NO: 577 and ends at any one of amino acids 287-313 of SEQ ID NO: 577. In some embodiments, the Crim1:hemojuvelin heteromultimer comprises a polypeptide that is at least 70%, 75%, 80%, 85%, 90%, 91%, 92%, 93%, 94%, 95%, 95%, 96%, 97%, 98%, 99%, or 100% identical to a polypeptide that begins at any one of amino acids of 1-6 of SEQ ID NO: 577 and ends at any one of amino acids 54-59 of SEQ ID NO: 577. In some embodiments, the Crim1:hemojuvelin heteromultimer comprises a polypeptide that is at least 70%, 75%, 80%, 85%, 90%, 91%, 92%, 93%, 94%, 95%, 95%, 96%, 97%, 98%, 99%, or 100% identical to a polypeptide that begins at any one of amino acids of 60-72 of SEQ ID NO: 577 and ends at any one of amino acids 248-287 of SEQ ID NO: 577. In some embodiments, the Crim1:hemojuvelin heteromultimer comprises a hemojuvelin protein, wherein the hemojuvelin protein is a dimer comprising a first polypeptide that is at least 70%, 75%, 80%, 85%, 90%, 91%, 92%, 93%, 94%, 95%, 96%, 97%, 98%, 99%, or 100% identical to a polypeptide that begins at any one of amino acids of 1-6 of SEQ ID NO: 577 and ends at any one of amino acids 54-59 of SEQ ID NO: 577, and second polypeptide that is at least 70%, 75%, 80%, 85%, 90%, 91%, 92%, 93%, 94%, 95%, 96%, 97%, 98%, 99%, or 100% identical to a polypeptide that begins at any one of amino acids of 60-72 of SEQ ID NO: 577 and ends at any one of amino acids 248-287 of SEQ ID NO: 577. In some embodiments, the Crim1:hemojuvelin heteromultimer comprises a single chain ligand trap that comprises a first hemojuvelin polypeptide domain that is at least 70%, 75%, 80%, 85%, 90%, 91%, 92%, 93%, 94%, 95%, 96%, 97%, 98%, 99%, or 100% identical to a polypeptide that begins at any one of amino acids of 1-6 of SEQ ID NO: 577 and ends at any one of amino acids 54-59 of SEQ ID NO: 577, and second hemojuvelin polypeptide domain that is at least 70%, 75%, 80%, 85%, 90%, 91%, 92%, 93%, 94%, 95%, 96%, 97%, 98%, 99%, or 100% identical to a polypeptide that begins at any one of amino acids of 60-72 of SEQ ID NO: 577, and ends at any one of amino acids 248-287 of SEQ ID NO: 577. In some embodiments, the Crim1:hemojuvelin heteromultimer comprises a polypeptide that is at least 70%, 75%, 80%, 85%, 90%, 91%, 92%, 93%, 94%, 95%, 95%, 96%, 97%, 98%, 99%, or 100% identical to a polypeptide that begins at any one of amino acids of 1-4 of SEQ ID NO: 581 and ends at any one of amino acids 135-200 of SEQ ID NO: 581. In certain preferred embodiments, Crim1:hemojuvelin heteromultimers are soluble. In some embodiments, a Crim1:hemojuvelin heteromultimer of the disclosure binds to one or more TGF-beta superfamily ligands (e.g., binds to one or more TGF-beta superfamily ligands with a K_{D} of at least 1×10⁻⁷). In some embodiments, a Crim1:hemojuvelin heteromultimer of the disclosure inhibits one or more TGF-beta superfamily ligands (e.g., inhibits Smad signaling). Heteromultimer-ligand binding and inhibition may be determined using a variety of assays including, for example, those described herein (e.g., in vitro binding and/or cell-based signaling assays). In some embodiments, a Crim1:hemojuvelin heteromultimer of the disclosure has a different TGF-beta ligand binding and/or inhibition profile (specificity) compared to a corresponding homomultimer (e.g., Crim1 and hemojuvelin homomultimers). In some embodiments, a Crim1:hemojuvelin heteromultimer of the disclosure is a heterodimer.

[0203] In certain aspects, the disclosure relates to heteromultimers that comprise at least one Crim2 polypeptide, which includes fragments, functional variants, and modified forms thereof, and at least one BAMBI polypeptide, which includes fragments, functional variants, and modified forms thereof. In some embodiments, the Crim2:BAMBI heteromultimer comprises a polypeptide that is at least 70%, 75%, 80%, 85%, 90%, 91%, 92%, 93%, 94%, 95%, 95%, 96%, 97%, 98%, 99%, or 100% identical to the amino acid sequence of any one of SEQ ID NOs: 541, 542, 545, or 546. In some embodiments, the Crim2:BAMBI heteromultimer comprises a polypeptide that is at least 70%, 75%, 80%, 85%, 90%, 91%, 92%, 93%, 94%, 95%, 95%, 96%, 97%, 98%, 99%, or 100% identical to a polypeptide that begins at any one of amino acids of 26-138 of SEQ ID NO: 541 and ends at any one of amino acids 1298-1503 of SEQ ID NO: 541. In some embodiments, the Crim2:BAMBI heteromultimer comprises a polypeptide that is at least 70%, 75%, 80%, 85%, 90%, 91%, 92%, 93%, 94%, 95%, 95%, 96%, 97%, 98%, 99%, or 100% identical to a polypeptide that begins at any one of amino acids of 24-138 of SEQ ID NO: 545 and ends at any one of amino acids 539-814 of SEQ ID NO: 545. In some embodiments, the Crim2:BAMBI heteromultimer comprises a polypeptide that is at least 70%, 75%, 80%, 85%, 90%, 91%, 92%, 93%, 94%, 95%, 95%, 96%, 97%, 98%, 99%, or 100% identical to the amino acid sequence of any one of SEQ ID NOs: 549 or 550. In some embodiments, the Crim2:BAMBI heteromultimer comprises a polypeptide that is at least 70%, 75%, 80%, 85%, 90%, 91%, 92%, 93%, 94%, 95%, 95%, 96%, 97%, 98%, 99%, or 100% identical to a polypeptide that begins at any one of amino acids of 21-30 of SEQ ID NO: 549 and ends at any one of amino acids 104-152 of SEQ ID NO: 549. In certain preferred embodiments, Crim2:BAMBI heteromultimers are soluble. In some embodiments, a Crim2:BAMBI heteromultimer of the disclosure binds to one or more TGF-beta superfamily ligands (e.g., binds to one or more TGF-beta superfamily ligands with a K_{D} of at least 1×10⁻⁷). In some embodiments, a Crim2:BAMBI heteromultimer of the disclosure inhibits one or more TGF-beta superfamily ligands (e.g., inhibits Smad signaling). Heteromultimer-ligand binding and inhibition may be determined using a variety of assays including, for example, those described herein (e.g., in vitro binding and/or cell-based signaling assays). In some embodiments, a Crim2:BAMBI heteromultimer of the disclosure has a different TGF-beta ligand binding and/or inhibition profile (specificity) compared to a corresponding homomultimer (e.g., Crim2 and BAMBI homomultimers). In some embodiments, a Crim2:BAMBI heteromultimer of the disclosure is a heterodimer.

[0204] In certain aspects, the disclosure relates to heteromultimers that comprise at least one Crim2 polypeptide, which includes fragments, functional variants, and modified forms thereof, and at least one BMPER polypeptide, which includes fragments, functional variants, and modified forms thereof. In some embodiments, the Crim2:BMPER heteromultimer comprises a polypeptide that is at least 70%, 75%, 80%, 85%, 90%, 91%, 92%, 93%, 94%, 95%, 95%, 96%, 97%, 98%, 99%, or 100% identical to the amino acid sequence of any one of SEQ ID NOs: 541, 542, 545, or 546. In some embodiments, the Crim2:BMPER heteromultimer comprises a polypeptide that is at least 70%, 75%, 80%, 85%, 90%, 91%, 92%, 93%, 94%, 95%, 95%, 96%, 97%, 98%, 99%, or 100% identical to a polypeptide that begins at any one of amino acids of 26-138 of SEQ ID NO: 541 and ends at any one of amino acids 1298-1503 of SEQ ID NO: 541. In some embodiments, the Crim2:BMPER heteromultimer comprises a polypeptide that is at least 70%, 75%, 80%, 85%, 90%, 91%, 92%, 93%, 94%, 95%, 95%, 96%, 97%, 98%, 99%, or 100% identical to a polypeptide that begins at any one of amino acids of 24-138 of SEQ ID NO: 545 and ends at any one of amino acids 539-814 of SEQ ID NO: 545. In some embodiments, the Crim2:BMPER heteromultimer comprises a polypeptide that is at least 70%, 75%, 80%, 85%, 90%, 91%, 92%, 93%, 94%, 95%, 95%, 96%, 97%, 98%, 99%, or 100% identical to the amino acid sequence of any one of SEQ ID NOs: 553 or 554. In some embodiments, the Crim2:BMPER heteromultimer comprises a polypeptide that is at least 70%, 75%, 80%, 85%, 90%, 91%, 92%, 93%, 94%, 95%, 95%, 96%, 97%, 98%, 99%, or 100% identical to a polypeptide that begins at any one of amino acids of 39-50 of SEQ ID NO: 553 and ends at any one of amino acids 364-369 of SEQ ID NO: 553. In some embodiments, the Crim2:BMPER heteromultimer comprises a polypeptide that is at least 70%, 75%, 80%, 85%, 90%, 91%, 92%, 93%, 94%, 95%, 95%, 96%, 97%, 98%, 99%, or 100% identical to a polypeptide that begins at any one of amino acids of 370-386 of SEQ ID NO: 553 and ends at any one of amino acids 682-685 of SEQ ID NO: 553. In some embodiments, the Crim2:BMPER heteromultimer comprises a polypeptide that is at least 70%, 75%, 80%, 85%, 90%, 91%, 92%, 93%, 94%, 95%, 95%, 96%, 97%, 98%, 99%, or 100% identical to a polypeptide that begins at any one of amino acids of 39-50 of SEQ ID NO: 553 and ends at any one of amino acids 682-685 of SEQ ID NO: 553. In some embodiments, the Crim2:BMPER heteromultimer comprises a BMPER protein, wherein the BMPER protein is a dimer comprising a first polypeptide that is at least 70%, 75%, 80%, 85%, 90%, 91%, 92%, 93%, 94%, 95%, 96%, 97%, 98%, 99%, or 100% identical to a polypeptide that begins at any one of amino acids of 39-50 of SEQ ID NO: 553 and ends at any one of amino acids 364-369 of SEQ ID NO: 553, and second polypeptide that is at least 70%, 75%, 80%, 85%, 90%, 91%, 92%, 93%, 94%, 95%, 96%, 97%, 98%, 99%, or 100% identical to a polypeptide that begins at any one of amino acids of 370-386 of SEQ ID NO: 553, and ends at any one of amino acids 682-685 of SEQ ID NO: 553. In some embodiments, the Crim2:BMPER heteromultimer comprises a single chain ligand trap that comprises a first BMPER polypeptide domain that is at least 70%, 75%, 80%, 85%, 90%, 91%, 92%, 93%, 94%, 95%, 96%, 97%, 98%, 99%, or 100% identical to a polypeptide that begins at any one of amino acids of 39-50 of SEQ ID NO: 553 and ends at any one of amino acids 364-369 of SEQ ID NO: 553, and second BMPER polypeptide domain that is at least 70%, 75%, 80%, 85%, 90%, 91%, 92%, 93%, 94%, 95%, 96%, 97%, 98%, 99%, or 100% identical to a polypeptide that begins at any one of amino acids of 370-386 of SEQ ID NO: 553 and ends at any one of amino acids 682-685 of SEQ ID NO: 553. In certain preferred embodiments, Crim2:BMPER heteromultimers are soluble. In some embodiments, a Crim2:BMPER heteromultimer of the disclosure binds to one or more TGF-beta superfamily ligands (e.g., binds to one or more TGF-beta superfamily ligands with a K_{D} of at least 1×10⁻⁷). In some embodiments, a Crim2:BMPER heteromultimer of the disclosure inhibits one or more TGF-beta superfamily ligands (e.g., inhibits Smad signaling). Heteromultimer-ligand binding and inhibition may be determined using a variety of assays including, for example, those described herein (e.g., in vitro binding and/or cell-based signaling assays). In some embodiments, a Crim2:BMPER heteromultimer of the disclosure has a different TGF-beta ligand binding and/or inhibition profile (specificity) compared to a corresponding homomultimer (e.g., Crim2 and BMPER homomultimers). In some embodiments, a Crim2:BMPER heteromultimer of the disclosure is a heterodimer.

[0205] In certain aspects, the disclosure relates to heteromultimers that comprise at least one Crim2 polypeptide, which includes fragments, functional variants, and modified forms thereof, and at least one RGM-A polypeptide, which includes fragments, functional variants, and modified forms thereof. In some embodiments, the Crim2:RGM-A heteromultimer comprises a polypeptide that is at least 70%, 75%, 80%, 85%, 90%, 91%, 92%, 93%, 94%, 95%, 95%, 96%, 97%, 98%, 99%, or 100% identical to the amino acid sequence of any one of SEQ ID NOs: 541, 542, 545, or 546. In some embodiments, the Crim2:RGM-A heteromultimer comprises a polypeptide that is at least 70%, 75%, 80%, 85%, 90%, 91%, 92%, 93%, 94%, 95%, 95%, 96%, 97%, 98%, 99%, or 100% identical to a polypeptide that begins at any one of amino acids of 26-138 of SEQ ID NO: 541 and ends at any one of amino acids 1298-1503 of SEQ ID NO: 541. In some embodiments, the Crim2:RGM-A heteromultimer comprises a polypeptide that is at least 70%, 75%, 80%, 85%, 90%, 91%, 92%, 93%, 94%, 95%, 95%, 96%, 97%, 98%, 99%, or 100% identical to a polypeptide that begins at any one of amino acids of 24-138 of SEQ ID NO: 545 and ends at any one of amino acids 539-814 of SEQ ID NO: 545. In some embodiments, the Crim2:RGM-A heteromultimer comprises a polypeptide that is at least 70%, 75%, 80%, 85%, 90%, 91%, 92%, 93%, 94%, 95%, 95%, 96%, 97%, 98%, 99%, or 100% identical to the amino acid sequence of any one of SEQ ID NOs: 553 or 554. In some embodiments, the Crim2:RGM-A heteromultimer comprises a polypeptide that is at least 70%, 75%, 80%, 85%, 90%, 91%, 92%, 93%, 94%, 95%, 95%, 96%, 97%, 98%, 99%, or 100% identical to a polypeptide that begins at any one of amino acids of 1-177 of SEQ ID NO: 561 and ends at any one of amino acids 430-458 of SEQ ID NO: 561. In some embodiments, the Crim2:RGM-A heteromultimer comprises a polypeptide that is at least 70%, 75%, 80%, 85%, 90%, 91%, 92%, 93%, 94%, 95%, 95%, 96%, 97%, 98%, 99%, or 100% identical to a polypeptide that begins at any one of amino acids of 1-153 of SEQ ID NO: 565 and ends at any one of amino acids 406-434 of SEQ ID NO: 565. In some embodiments, the Crim2:RGM-A heteromultimer comprises a polypeptide that is at least 70%, 75%, 80%, 85%, 90%, 91%, 92%, 93%, 94%, 95%, 95%, 96%, 97%, 98%, 99%, or 100% identical to a polypeptide that begins at any one of amino acids of 1-169 of SEQ ID NO: 569 and ends at any one of amino acids 422-450 of SEQ ID NO: 569. In certain preferred embodiments, Crim2:RGM-A heteromultimers are soluble. In some embodiments, a Crim2:RGM-A heteromultimer of the disclosure binds to one or more TGF-beta superfamily ligands (e.g., binds to one or more TGF-beta superfamily ligands with a K_{D} of at least 1×10⁻⁷). In some embodiments, a Crim2:RGM-A heteromultimer of the disclosure inhibits one or more TGF-beta superfamily ligands (e.g., inhibits Smad signaling). Heteromultimer-ligand binding and inhibition may be determined using a variety of assays including, for example, those described herein (e.g., in vitro binding and/or cell-based signaling assays). In some embodiments, a Crim2:RGM-A heteromultimer of the disclosure has a different TGF-beta ligand binding and/or inhibition profile (specificity) compared to a corresponding homomultimer (e.g., Crim2 and RGM-A homomultimers). In some embodiments, a Crim2:RGM-A heteromultimer of the disclosure is a heterodimer.

[0206] In certain aspects, the disclosure relates to heteromultimers that comprise at least one Crim2 polypeptide, which includes fragments, functional variants, and modified forms thereof, and at least one RGM-B polypeptide, which includes fragments, functional variants, and modified forms thereof. In some embodiments, the Crim2:RGM-B heteromultimer comprises a polypeptide that is at least 70%, 75%, 80%, 85%, 90%, 91%, 92%, 93%, 94%, 95%, 95%, 96%, 97%, 98%, 99%, or 100% identical to the amino acid sequence of any one of SEQ ID NOs: 541, 542, 545, or 546. In some embodiments, the Crim2:RGM-B heteromultimer comprises a polypeptide that is at least 70%, 75%, 80%, 85%, 90%, 91%, 92%, 93%, 94%, 95%, 95%, 96%, 97%, 98%, 99%, or 100% identical to a polypeptide that begins at any one of amino acids of 26-138 of SEQ ID NO: 541 and ends at any one of amino acids 1298-1503 of SEQ ID NO: 541. In some embodiments, the Crim2:RGM-B heteromultimer comprises a polypeptide that is at least 70%, 75%, 80%, 85%, 90%, 91%, 92%, 93%, 94%, 95%, 95%, 96%, 97%, 98%, 99%, or 100% identical to a polypeptide that begins at any one of amino acids of 24-138 of SEQ ID NO: 545 and ends at any one of amino acids 539-814 of SEQ ID NO: 545. In some embodiments, the Crim2:RGM-B heteromultimer comprises a polypeptide that is at least 70%, 75%, 80%, 85%, 90%, 91%, 92%, 93%, 94%, 95%, 95%, 96%, 97%, 98%, 99%, or 100% identical to the amino acid sequence of any one of SEQ ID NOs: 557 or 558. In some embodiments, the Crim2:RGM-B heteromultimer comprises a polypeptide that is at least 70%, 75%, 80%, 85%, 90%, 91%, 92%, 93%, 94%, 95%, 95%, 96%, 97%, 98%, 99%, or 100% identical to a polypeptide that begins at any one of amino acids of 1-87 of SEQ ID NO: 557 and ends at any one of amino acids 452-478 of SEQ ID NO: 557. In some embodiments, the Crim2:RGM-B heteromultimer comprises a polypeptide that is at least 70%, 75%, 80%, 85%, 90%, 91%, 92%, 93%, 94%, 95%, 95%, 96%, 97%, 98%, 99%, or 100% identical to a polypeptide that begins at any one of amino acids of 210-222 of SEQ ID NO: 557 and ends at any one of amino acids 413-452 of SEQ ID NO: 557. In some embodiments, the Crim2:RGM-B heteromultimer comprises a polypeptide that is at least 70%, 75%, 80%, 85%, 90%, 91%, 92%, 93%, 94%, 95%, 95%, 96%, 97%, 98%, 99%, or 100% identical to a polypeptide that begins at any one of amino acids of 87-95 of SEQ ID NO: 557 and ends at any one of amino acids 204-209 of SEQ ID NO: 557. In some embodiments, the Crim2:RGM-B heteromultimer comprises a RGM-B protein, wherein the RGM-B protein is a dimer comprising a first polypeptide that is at least 70%, 75%, 80%, 85%, 90%, 91%, 92%, 93%, 94%, 95%, 96%, 97%, 98%, 99%, or 100% identical to a polypeptide that begins at any one of amino acids of 87-95 of SEQ ID NO: 557 and ends at any one of amino acids 204-209 of SEQ ID NO: 557 and second polypeptide that is at least 70%, 75%, 80%, 85%, 90%, 91%, 92%, 93%, 94%, 95%, 96%, 97%, 98%, 99%, or 100% identical to a polypeptide that begins at any one of amino acids of 210-222 of SEQ ID NO: 557 and ends at any one of amino acids 413-452 of SEQ ID NO: 557. In some embodiments, the Crim2:RGM-B heteromultimer comprises a single chain ligand trap that comprises a first RGM-B polypeptide domain that is at least 70%, 75%, 80%, 85%, 90%, 91%, 92%, 93%, 94%, 95%, 96%, 97%, 98%, 99%, or 100% identical to a polypeptide that begins at any one of amino acids of 87-95 of SEQ ID NO: 557 and ends at any one of amino acids 204-209 of SEQ ID NO: 557 and second RGM-B polypeptide domain that is at least 70%, 75%, 80%, 85%, 90%, 91%, 92%, 93%, 94%, 95%, 96%, 97%, 98%, 99%, or 100% identical to a polypeptide that begins at any one of amino acids of 210-222 of SEQ ID NO: 557 and ends at any one of amino acids 413-452 of SEQ ID NO: 557. In certain preferred embodiments, Crim2:RGM-B heteromultimers are soluble. In some embodiments, a Crim2:RGM-B heteromultimer of the disclosure binds to one or more TGF-beta superfamily ligands (e.g., binds to one or more TGF-beta superfamily ligands with a K_{D} of at least 1×10⁻⁷). In some embodiments, a Crim2:RGM-B heteromultimer of the disclosure inhibits one or more TGF-beta superfamily ligands (e.g., inhibits Smad signaling). Heteromultimer-ligand binding and inhibition may be determined using a variety of assays including, for example, those described herein (e.g., in vitro binding and/or cell-based signaling assays). In some embodiments, a Crim2:RGM-B heteromultimer of the disclosure has a different TGF-beta ligand binding and/or inhibition profile (specificity) compared to a corresponding homomultimer (e.g., Crim2 and RGM-B homomultimers). In some embodiments, a Crim2:RGM-B heteromultimer of the disclosure is a heterodimer.

[0207] In certain aspects, the disclosure relates to heteromultimers that comprise at least one Crim2 polypeptide, which includes fragments, functional variants, and modified forms thereof, and at least one hemojuvelin polypeptide, which includes fragments, functional variants, and modified forms thereof. In some embodiments, the Crim2:hemojuvelin heteromultimer comprises a polypeptide that is at least 70%, 75%, 80%, 85%, 90%, 91%, 92%, 93%, 94%, 95%, 95%, 96%, 97%, 98%, 99%, or 100% identical to the amino acid sequence of any one of SEQ ID NOs: 541, 542, 545, or 546. In some embodiments, the Crim2:hemojuvelin heteromultimer comprises a polypeptide that is at least 70%, 75%, 80%, 85%, 90%, 91%, 92%, 93%, 94%, 95%, 95%, 96%, 97%, 98%, 99%, or 100% identical to a polypeptide that begins at any one of amino acids of 26-138 of SEQ ID NO: 541 and ends at any one of amino acids 1298-1503 of SEQ ID NO: 541. In some embodiments, the Crim2:hemojuvelin heteromultimer comprises a polypeptide that is at least 70%, 75%, 80%, 85%, 90%, 91%, 92%, 93%, 94%, 95%, 95%, 96%, 97%, 98%, 99%, or 100% identical to a polypeptide that begins at any one of amino acids of 24-138 of SEQ ID NO: 545 and ends at any one of amino acids 539-814 of SEQ ID NO: 545. In some embodiments, the Crim2:hemojuvelin heteromultimer comprises a polypeptide that is at least 70%, 75%, 80%, 85%, 90%, 91%, 92%, 93%, 94%, 95%, 95%, 96%, 97%, 98%, 99%, or 100% identical to the amino acid sequence of any one of SEQ ID NOs: 573, 574, 577, 578, 581, or 582. In some embodiments, the Crim2:hemojuvelin heteromultimer comprises a polypeptide that is at least 70%, 75%, 80%, 85%, 90%, 91%, 92%, 93%, 94%, 95%, 95%, 96%, 97%, 98%, 99%, or 100% identical to a polypeptide that begins at any one of amino acids of 1-36 of SEQ ID NO: 573 and ends at any one of amino acids 400-426 of SEQ ID NO: 573. In some embodiments, the Crim2:hemojuvelin heteromultimer comprises a polypeptide that is at least 70%, 75%, 80%, 85%, 90%, 91%, 92%, 93%, 94%, 95%, 95%, 96%, 97%, 98%, 99%, or 100% identical to a polypeptide that begins at any one of amino acids of 36-42 of SEQ ID NO: 573 and ends at any one of amino acids 167-172 of SEQ ID NO: 573. In some embodiments, the Crim2:hemojuvelin heteromultimer comprises a polypeptide that is at least 70%, 75%, 80%, 85%, 90%, 91%, 92%, 93%, 94%, 95%, 95%, 96%, 97%, 98%, 99%, or 100% identical to a polypeptide that begins at any one of amino acids of 173-185 of SEQ ID NO: 573 and ends at any one of amino acids 361-400 of SEQ ID NO: 573. In some embodiments, the Crim2:hemojuvelin heteromultimer comprises a hemojuvelin protein that is a dimer comprising a first polypeptide that is at least 70%, 75%, 80%, 85%, 90%, 91%, 92%, 93%, 94%, 95%, 96%, 97%, 98%, 99%, or 100% identical to a polypeptide that begins at any one of amino acids of 36-42 of SEQ ID NO: 573, and ends at any one of amino acids 167-172 of SEQ ID NO: 573 and second polypeptide that is at least 70%, 75%, 80%, 85%, 90%, 91%, 92%, 93%, 94%, 95%, 96%, 97%, 98%, 99%, or 100% identical to a polypeptide that begins at any one of amino acids of 173-185 of SEQ ID NO: 573 and ends at any one of amino acids 361-400 of SEQ ID NO: 573. In some embodiments, the Crim2:hemojuvelin heteromultimer comprises a single chain ligand trap that comprises a first hemojuvelin polypeptide domain that is at least 70%, 75%, 80%, 85%, 90%, 91%, 92%, 93%, 94%, 95%, 96%, 97%, 98%, 99%, or 100% identical to a polypeptide that begins at any one of amino acids of 36-42 of SEQ ID NO: 573 and ends at any one of amino acids 167-172 of SEQ ID NO: 573 and second hemojuvelin polypeptide domain that is at least 70%, 75%, 80%, 85%, 90%, 91%, 92%, 93%, 94%, 95%, 96%, 97%, 98%, 99%, or 100% identical to a polypeptide that begins at any one of amino acids of 173-185 of SEQ ID NO: 573 and ends at any one of amino acids 361-400 of SEQ ID NO: 573. In some embodiments, the Crim2:hemojuvelin heteromultimer comprises a polypeptide that is at least 70%, 75%, 80%, 85%, 90%, 91%, 92%, 93%, 94%, 95%, 95%, 96%, 97%, 98%, 99%, or 100% identical to a polypeptide that begins at any one of amino acids of 1-6 of SEQ ID NO: 577 and ends at any one of amino acids 287-313 of SEQ ID NO: 577. In some embodiments, the Crim2:hemojuvelin heteromultimer comprises a polypeptide that is at least 70%, 75%, 80%, 85%, 90%, 91%, 92%, 93%, 94%, 95%, 95%, 96%, 97%, 98%, 99%, or 100% identical to a polypeptide that begins at any one of amino acids of 1-6 of SEQ ID NO: 577 and ends at any one of amino acids 54-59 of SEQ ID NO: 577. In some embodiments, the Crim2:hemojuvelin heteromultimer comprises a polypeptide that is at least 70%, 75%, 80%, 85%, 90%, 91%, 92%, 93%, 94%, 95%, 95%, 96%, 97%, 98%, 99%, or 100% identical to a polypeptide that begins at any one of amino acids of 60-72 of SEQ ID NO: 577 and ends at any one of amino acids 248-287 of SEQ ID NO: 577. In some embodiments, the Crim2:hemojuvelin heteromultimer comprises a hemojuvelin protein, wherein the hemojuvelin protein is a dimer comprising a first polypeptide that is at least 70%, 75%, 80%, 85%, 90%, 91%, 92%, 93%, 94%, 95%, 96%, 97%, 98%, 99%, or 100% identical to a polypeptide that begins at any one of amino acids of 1-6 of SEQ ID NO: 577 and ends at any one of amino acids 54-59 of SEQ ID NO: 577, and second polypeptide that is at least 70%, 75%, 80%, 85%, 90%, 91%, 92%, 93%, 94%, 95%, 96%, 97%, 98%, 99%, or 100% identical to a polypeptide that begins at any one of amino acids of 60-72 of SEQ ID NO: 577 and ends at any one of amino acids 248-287 of SEQ ID NO: 577. In some embodiments, the Crim2:hemojuvelin heteromultimer comprises a single chain ligand trap that comprises a first hemojuvelin polypeptide domain that is at least 70%, 75%, 80%, 85%, 90%, 91%, 92%, 93%, 94%, 95%, 96%, 97%, 98%, 99%, or 100% identical to a polypeptide that begins at any one of amino acids of 1-6 of SEQ ID NO: 577 and ends at any one of amino acids 54-59 of SEQ ID NO: 577, and second hemojuvelin polypeptide domain that is at least 70%, 75%, 80%, 85%, 90%, 91%, 92%, 93%, 94%, 95%, 96%, 97%, 98%, 99%, or 100% identical to a polypeptide that begins at any one of amino acids of 60-72 of SEQ ID NO: 577, and ends at any one of amino acids 248-287 of SEQ ID NO: 577. In some embodiments, the Crim2:hemojuvelin heteromultimer comprises a polypeptide that is at least 70%, 75%, 80%, 85%, 90%, 91%, 92%, 93%, 94%, 95%, 95%, 96%, 97%, 98%, 99%, or 100% identical to a polypeptide that begins at any one of amino acids of 1-4 of SEQ ID NO: 581 and ends at any one of amino acids 135-200 of SEQ ID NO: 581. In certain preferred embodiments, Crim2:hemojuvelin heteromultimers are soluble. In some embodiments, a Crim2:hemojuvelin heteromultimer of the disclosure binds to one or more TGF-beta superfamily ligands (e.g., binds to one or more TGF-beta superfamily ligands with a K_{D} of at least 1×10⁻⁷). In some embodiments, a Crim2:hemojuvelin heteromultimer of the disclosure inhibits one or more TGF-beta superfamily ligands (e.g., inhibits Smad signaling). Heteromultimer-ligand binding and inhibition may be determined using a variety of assays including, for example, those described herein (e.g., in vitro binding and/or cell-based signaling assays). In some embodiments, a Crim2:hemojuvelin heteromultimer of the disclosure has a different TGF-beta ligand binding and/or inhibition profile (specificity) compared to a corresponding homomultimer (e.g., Crim2 and hemojuvelin homomultimers). In some embodiments, a Crim2:hemojuvelin heteromultimer of the disclosure is a heterodimer.

[0208] In certain aspects, the disclosure relates to heteromultimers that comprise at least one BAMBI polypeptide, which includes fragments, functional variants, and modified forms thereof, and at least one BMPER polypeptide, which includes fragments, functional variants, and modified forms thereof. In some embodiments, the BAMBI:BMPER heteromultimer comprises a polypeptide that is at least 70%, 75%, 80%, 85%, 90%, 91%, 92%, 93%, 94%, 95%, 95%, 96%, 97%, 98%, 99%, or 100% identical to the amino acid sequence of any one of SEQ ID NOs: 549 or 550. In some embodiments, the BAMBI:BMPER heteromultimer comprises a polypeptide that is at least 70%, 75%, 80%, 85%, 90%, 91%, 92%, 93%, 94%, 95%, 95%, 96%, 97%, 98%, 99%, or 100% identical to a polypeptide that begins at any one of amino acids of 21-30 of SEQ ID NO: 549 and ends at any one of amino acids 104-152 of SEQ ID NO: 549. In some embodiments, the BAMBI:BMPER heteromultimer comprises a polypeptide that is at least 70%, 75%, 80%, 85%, 90%, 91%, 92%, 93%, 94%, 95%, 95%, 96%, 97%, 98%, 99%, or 100% identical to the amino acid sequence of any one of SEQ ID NOs: 553 or 554. In some embodiments, the BAMBI:BMPER heteromultimer comprises a polypeptide that is at least 70%, 75%, 80%, 85%, 90%, 91%, 92%, 93%, 94%, 95%, 95%, 96%, 97%, 98%, 99%, or 100% identical to a polypeptide that begins at any one of amino acids of 39-50 of SEQ ID NO: 553 and ends at any one of amino acids 364-369 of SEQ ID NO: 553. In some embodiments, the BAMBI:BMPER heteromultimer comprises a polypeptide that is at least 70%, 75%, 80%, 85%, 90%, 91%, 92%, 93%, 94%, 95%, 95%, 96%, 97%, 98%, 99%, or 100% identical to a polypeptide that begins at any one of amino acids of 370-386 of SEQ ID NO: 553 and ends at any one of amino acids 682-685 of SEQ ID NO: 553. In some embodiments, the BAMBI:BMPER heteromultimer comprises a polypeptide that is at least 70%, 75%, 80%, 85%, 90%, 91%, 92%, 93%, 94%, 95%, 95%, 96%, 97%, 98%, 99%, or 100% identical to a polypeptide that begins at any one of amino acids of 39-50 of SEQ ID NO: 553 and ends at any one of amino acids 682-685 of SEQ ID NO: 553. In some embodiments, the BAMBI:BMPER heteromultimer comprises a BMPER protein, wherein the BMPER protein is a dimer comprising a first polypeptide that is at least 70%, 75%, 80%, 85%, 90%, 91%, 92%, 93%, 94%, 95%, 96%, 97%, 98%, 99%, or 100% identical to a polypeptide that begins at any one of amino acids of 39-50 of SEQ ID NO: 553 and ends at any one of amino acids 364-369 of SEQ ID NO: 553, and second polypeptide that is at least 70%, 75%, 80%, 85%, 90%, 91%, 92%, 93%, 94%, 95%, 96%, 97%, 98%, 99%, or 100% identical to a polypeptide that begins at any one of amino acids of 370-386 of SEQ ID NO: 553, and ends at any one of amino acids 682-685 of SEQ ID NO: 553. In some embodiments, the BAMBI:BMPER heteromultimer comprises a single chain ligand trap that comprises a first BMPER polypeptide domain that is at least 70%, 75%, 80%, 85%, 90%, 91%, 92%, 93%, 94%, 95%, 96%, 97%, 98%, 99%, or 100% identical to a polypeptide that begins at any one of amino acids of 39-50 of SEQ ID NO: 553 and ends at any one of amino acids 364-369 of SEQ ID NO: 553, and second BMPER polypeptide domain that is at least 70%, 75%, 80%, 85%, 90%, 91%, 92%, 93%, 94%, 95%, 96%, 97%, 98%, 99%, or 100% identical to a polypeptide that begins at any one of amino acids of 370-386 of SEQ ID NO: 553 and ends at any one of amino acids 682-685 of SEQ ID NO: 553. In certain preferred embodiments, BAMBI:BMPER heteromultimers are soluble. In some embodiments, a BAMBI:BMPER heteromultimer of the disclosure binds to one or more TGF-beta superfamily ligands (e.g., binds to one or more TGF-beta superfamily ligands with a K_{D} of at least 1×10⁻⁷). In some embodiments, a BAMBI:BMPER heteromultimer of the disclosure inhibits one or more TGF-beta superfamily ligands (e.g., inhibits Smad signaling). Heteromultimer-ligand binding and inhibition may be determined using a variety of assays including, for example, those described herein (e.g., in vitro binding and/or cell-based signaling assays). In some embodiments, a BAMBI:BMPER heteromultimer of the disclosure has a different TGF-beta ligand binding and/or inhibition profile (specificity) compared to a corresponding homomultimer (e.g., BAMBI and BMPER homomultimers). In some embodiments, a BAMBI:BMPER heteromultimer of the disclosure is a heterodimer.

[0209] In certain aspects, the disclosure relates to heteromultimers that comprise at least one BAMBI polypeptide, which includes fragments, functional variants, and modified forms thereof, and at least one RGM-A polypeptide, which includes fragments, functional variants, and modified forms thereof. In some embodiments, the BAMBI:RGM-A heteromultimer comprises a polypeptide that is at least 70%, 75%, 80%, 85%, 90%, 91%, 92%, 93%, 94%, 95%, 95%, 96%, 97%, 98%, 99%, or 100% identical to the amino acid sequence of any one of SEQ ID NOs: 549 or 550. In some embodiments, the BAMBI:RGM-A heteromultimer comprises a polypeptide that is at least 70%, 75%, 80%, 85%, 90%, 91%, 92%, 93%, 94%, 95%, 95%, 96%, 97%, 98%, 99%, or 100% identical to a polypeptide that begins at any one of amino acids of 21-30 of SEQ ID NO: 549 and ends at any one of amino acids 104-152 of SEQ ID NO: 549. In some embodiments, the BAMBI:RGM-A heteromultimer comprises a polypeptide that is at least 70%, 75%, 80%, 85%, 90%, 91%, 92%, 93%, 94%, 95%, 95%, 96%, 97%, 98%, 99%, or 100% identical to the amino acid sequence of any one of SEQ ID NOs: 553 or 554. In some embodiments, the BAMBI:RGM-A heteromultimer comprises a polypeptide that is at least 70%, 75%, 80%, 85%, 90%, 91%, 92%, 93%, 94%, 95%, 95%, 96%, 97%, 98%, 99%, or 100% identical to a polypeptide that begins at any one of amino acids of 1-177 of SEQ ID NO: 561 and ends at any one of amino acids 430-458 of SEQ ID NO: 561. In some embodiments, the BAMBI:RGM-A heteromultimer comprises a polypeptide that is at least 70%, 75%, 80%, 85%, 90%, 91%, 92%, 93%, 94%, 95%, 95%, 96%, 97%, 98%, 99%, or 100% identical to a polypeptide that begins at any one of amino acids of 1-153 of SEQ ID NO: 565 and ends at any one of amino acids 406-434 of SEQ ID NO: 565. In some embodiments, the BAMBI:RGM-A heteromultimer comprises a polypeptide that is at least 70%, 75%, 80%, 85%, 90%, 91%, 92%, 93%, 94%, 95%, 95%, 96%, 97%, 98%, 99%, or 100% identical to a polypeptide that begins at any one of amino acids of 1-169 of SEQ ID NO: 569 and ends at any one of amino acids 422-450 of SEQ ID NO: 569. In certain preferred embodiments, BAMBI:RGM-A heteromultimers are soluble. In some embodiments, a BAMBI:RGM-A heteromultimer of the disclosure binds to one or more TGF-beta superfamily ligands (e.g., binds to one or more TGF-beta superfamily ligands with a K_{D} of at least 1×10⁻⁷). In some embodiments, a BAMBI:RGM-A heteromultimer of the disclosure inhibits one or more TGF-beta superfamily ligands (e.g., inhibits Smad signaling). Heteromultimer-ligand binding and inhibition may be determined using a variety of assays including, for example, those described herein (e.g., in vitro binding and/or cell-based signaling assays). In some embodiments, a BAMBI:RGM-A heteromultimer of the disclosure has a different TGF-beta ligand binding and/or inhibition profile (specificity) compared to a corresponding homomultimer (e.g., BAMBI and RGM-A homomultimers). In some embodiments, a BAMBI:RGM-A heteromultimer of the disclosure is a heterodimer.

[0210] In certain aspects, the disclosure relates to heteromultimers that comprise at least one BAMBI polypeptide, which includes fragments, functional variants, and modified forms thereof, and at least one RGM-B polypeptide, which includes fragments, functional variants, and modified forms thereof. In some embodiments, the BAMBI:RGM-B heteromultimer comprises a polypeptide that is at least 70%, 75%, 80%, 85%, 90%, 91%, 92%, 93%, 94%, 95%, 95%, 96%, 97%, 98%, 99%, or 100% identical to the amino acid sequence of any one of SEQ ID NOs: 549 or 550. In some embodiments, the BAMBI:RGM-B heteromultimer comprises a polypeptide that is at least 70%, 75%, 80%, 85%, 90%, 91%, 92%, 93%, 94%, 95%, 95%, 96%, 97%, 98%, 99%, or 100% identical to a polypeptide that begins at any one of amino acids of 21-30 of SEQ ID NO: 549 and ends at any one of amino acids 104-152 of SEQ ID NO: 549. In some embodiments, the BAMBI:RGM-B heteromultimer comprises a polypeptide that is at least 70%, 75%, 80%, 85%, 90%, 91%, 92%, 93%, 94%, 95%, 95%, 96%, 97%, 98%, 99%, or 100% identical to the amino acid sequence of any one of SEQ ID NOs: 557 or 558. In some embodiments, the BAMBI:RGM-B heteromultimer comprises a polypeptide that is at least 70%, 75%, 80%, 85%, 90%, 91%, 92%, 93%, 94%, 95%, 95%, 96%, 97%, 98%, 99%, or 100% identical to a polypeptide that begins at any one of amino acids of 1-87 of SEQ ID NO: 557 and ends at any one of amino acids 452-478 of SEQ ID NO: 557. In some embodiments, the BAMBI:RGM-B heteromultimer comprises a polypeptide that is at least 70%, 75%, 80%, 85%, 90%, 91%, 92%, 93%, 94%, 95%, 95%, 96%, 97%, 98%, 99%, or 100% identical to a polypeptide that begins at any one of amino acids of 210-222 of SEQ ID NO: 557 and ends at any one of amino acids 413-452 of SEQ ID NO: 557. In some embodiments, the BAMBI:RGM-B heteromultimer comprises a polypeptide that is at least 70%, 75%, 80%, 85%, 90%, 91%, 92%, 93%, 94%, 95%, 95%, 96%, 97%, 98%, 99%, or 100% identical to a polypeptide that begins at any one of amino acids of 87-95 of SEQ ID NO: 557 and ends at any one of amino acids 204-209 of SEQ ID NO: 557. In some embodiments, the BAMBI:RGM-B heteromultimer comprises a RGM-B protein, wherein the RGM-B protein is a dimer comprising a first polypeptide that is at least 70%, 75%, 80%, 85%, 90%, 91%, 92%, 93%, 94%, 95%, 96%, 97%, 98%, 99%, or 100% identical to a polypeptide that begins at any one of amino acids of 87-95 of SEQ ID NO: 557 and ends at any one of amino acids 204-209 of SEQ ID NO: 557 and second polypeptide that is at least 70%, 75%, 80%, 85%, 90%, 91%, 92%, 93%, 94%, 95%, 96%, 97%, 98%, 99%, or 100% identical to a polypeptide that begins at any one of amino acids of 210-222 of SEQ ID NO: 557 and ends at any one of amino acids 413-452 of SEQ ID NO: 557. In some embodiments, the BAMBI:RGM-B heteromultimer comprises a single chain ligand trap that comprises a first RGM-B polypeptide domain that is at least 70%, 75%, 80%, 85%, 90%, 91%, 92%, 93%, 94%, 95%, 96%, 97%, 98%, 99%, or 100% identical to a polypeptide that begins at any one of amino acids of 87-95 of SEQ ID NO: 557 and ends at any one of amino acids 204-209 of SEQ ID NO: 557 and second RGM-B polypeptide domain that is at least 70%, 75%, 80%, 85%, 90%, 91%, 92%, 93%, 94%, 95%, 96%, 97%, 98%, 99%, or 100% identical to a polypeptide that begins at any one of amino acids of 210-222 of SEQ ID NO: 557 and ends at any one of amino acids 413-452 of SEQ ID NO: 557. In certain preferred embodiments, BAMBI:RGM-B heteromultimers are soluble. In some embodiments, a BAMBI:RGM-B heteromultimer of the disclosure binds to one or more TGF-beta superfamily ligands (e.g., binds to one or more TGF-beta superfamily ligands with a K_{D} of at least 1×10⁻⁷). In some embodiments, a BAMBI:RGM-B heteromultimer of the disclosure inhibits one or more TGF-beta superfamily ligands (e.g., inhibits Smad signaling). Heteromultimer-ligand binding and inhibition may be determined using a variety of assays including, for example, those described herein (e.g., in vitro binding and/or cell-based signaling assays). In some embodiments, a BAMBI:RGM-B heteromultimer of the disclosure has a different TGF-beta ligand binding and/or inhibition profile (specificity) compared to a corresponding homomultimer (e.g., BAMBI and RGM-B homomultimers). In some embodiments, a BAMBI:RGM-B heteromultimer of the disclosure is a heterodimer.

[0211] In certain aspects, the disclosure relates to heteromultimers that comprise at least one BAMBI polypeptide, which includes fragments, functional variants, and modified forms thereof, and at least one hemojuvelin polypeptide, which includes fragments, functional variants, and modified forms thereof. In some embodiments, the BAMBI:hemojuvelin heteromultimer comprises a polypeptide that is at least 70%, 75%, 80%, 85%, 90%, 91%, 92%, 93%, 94%, 95%, 95%, 96%, 97%, 98%, 99%, or 100% identical to the amino acid sequence of any one of SEQ ID NOs: 549 or 550. In some embodiments, the BAMBI:hemojuvelin heteromultimer comprises a polypeptide that is at least 70%, 75%, 80%, 85%, 90%, 91%, 92%, 93%, 94%, 95%, 95%, 96%, 97%, 98%, 99%, or 100% identical to a polypeptide that begins at any one of amino acids of 21-30 of SEQ ID NO: 549 and ends at any one of amino acids 104-152 of SEQ ID NO: 549. In some embodiments, the BAMBI:hemojuvelin heteromultimer comprises a polypeptide that is at least 70%, 75%, 80%, 85%, 90%, 91%, 92%, 93%, 94%, 95%, 95%, 96%, 97%, 98%, 99%, or 100% identical to the amino acid sequence of any one of SEQ ID NOs: 573, 574, 577, 578, 581, or 582. In some embodiments, the BAMBI:hemojuvelin heteromultimer comprises a polypeptide that is at least 70%, 75%, 80%, 85%, 90%, 91%, 92%, 93%, 94%, 95%, 95%, 96%, 97%, 98%, 99%, or 100% identical to a polypeptide that begins at any one of amino acids of 1-36 of SEQ ID NO: 573 and ends at any one of amino acids 400-426 of SEQ ID NO: 573. In some embodiments, the BAMBI:hemojuvelin heteromultimer comprises a polypeptide that is at least 70%, 75%, 80%, 85%, 90%, 91%, 92%, 93%, 94%, 95%, 95%, 96%, 97%, 98%, 99%, or 100% identical to a polypeptide that begins at any one of amino acids of 36-42 of SEQ ID NO: 573 and ends at any one of amino acids 167-172 of SEQ ID NO: 573. In some embodiments, the BAMBI:hemojuvelin heteromultimer comprises a polypeptide that is at least 70%, 75%, 80%, 85%, 90%, 91%, 92%, 93%, 94%, 95%, 95%, 96%, 97%, 98%, 99%, or 100% identical to a polypeptide that begins at any one of amino acids of 173-185 of SEQ ID NO: 573 and ends at any one of amino acids 361-400 of SEQ ID NO: 573. In some embodiments, the BAMBI:hemojuvelin heteromultimer comprises a hemojuvelin protein that is a dimer comprising a first polypeptide that is at least 70%, 75%, 80%, 85%, 90%, 91%, 92%, 93%, 94%, 95%, 96%, 97%, 98%, 99%, or 100% identical to a polypeptide that begins at any one of amino acids of 36-42 of SEQ ID NO: 573, and ends at any one of amino acids 167-172 of SEQ ID NO: 573 and second polypeptide that is at least 70%, 75%, 80%, 85%, 90%, 91%, 92%, 93%, 94%, 95%, 96%, 97%, 98%, 99%, or 100% identical to a polypeptide that begins at any one of amino acids of 173-185 of SEQ ID NO: 573 and ends at any one of amino acids 361-400 of SEQ ID NO: 573. In some embodiments, the BAMBI:hemojuvelin heteromultimer comprises a single chain ligand trap that comprises a first hemojuvelin polypeptide domain that is at least 70%, 75%, 80%, 85%, 90%, 91%, 92%, 93%, 94%, 95%, 96%, 97%, 98%, 99%, or 100% identical to a polypeptide that begins at any one of amino acids of 36-42 of SEQ ID NO: 573 and ends at any one of amino acids 167-172 of SEQ ID NO: 573 and second hemojuvelin polypeptide domain that is at least 70%, 75%, 80%, 85%, 90%, 91%, 92%, 93%, 94%, 95%, 96%, 97%, 98%, 99%, or 100% identical to a polypeptide that begins at any one of amino acids of 173-185 of SEQ ID NO: 573 and ends at any one of amino acids 361-400 of SEQ ID NO: 573. In some embodiments, the BAMBI:hemojuvelin heteromultimer comprises a polypeptide that is at least 70%, 75%, 80%, 85%, 90%, 91%, 92%, 93%, 94%, 95%, 95%, 96%, 97%, 98%, 99%, or 100% identical to a polypeptide that begins at any one of amino acids of 1-6 of SEQ ID NO: 577 and ends at any one of amino acids 287-313 of SEQ ID NO: 577. In some embodiments, the BAMBI:hemojuvelin heteromultimer comprises a polypeptide that is at least 70%, 75%, 80%, 85%, 90%, 91%, 92%, 93%, 94%, 95%, 95%, 96%, 97%, 98%, 99%, or 100% identical to a polypeptide that begins at any one of amino acids of 1-6 of SEQ ID NO: 577 and ends at any one of amino acids 54-59 of SEQ ID NO: 577. In some embodiments, the BAMBI:hemojuvelin heteromultimer comprises a polypeptide that is at least 70%, 75%, 80%, 85%, 90%, 91%, 92%, 93%, 94%, 95%, 95%, 96%, 97%, 98%, 99%, or 100% identical to a polypeptide that begins at any one of amino acids of 60-72 of SEQ ID NO: 577 and ends at any one of amino acids 248-287 of SEQ ID NO: 577. In some embodiments, the BAMBI:hemojuvelin heteromultimer comprises a hemojuvelin protein, wherein the hemojuvelin protein is a dimer comprising a first polypeptide that is at least 70%, 75%, 80%, 85%, 90%, 91%, 92%, 93%, 94%, 95%, 96%, 97%, 98%, 99%, or 100% identical to a polypeptide that begins at any one of amino acids of 1-6 of SEQ ID NO: 577 and ends at any one of amino acids 54-59 of SEQ ID NO: 577, and second polypeptide that is at least 70%, 75%, 80%, 85%, 90%, 91%, 92%, 93%, 94%, 95%, 96%, 97%, 98%, 99%, or 100% identical to a polypeptide that begins at any one of amino acids of 60-72 of SEQ ID NO: 577 and ends at any one of amino acids 248-287 of SEQ ID NO: 577. In some embodiments, the BAMBI:hemojuvelin heteromultimer comprises a single chain ligand trap that comprises a first hemojuvelin polypeptide domain that is at least 70%, 75%, 80%, 85%, 90%, 91%, 92%, 93%, 94%, 95%, 96%, 97%, 98%, 99%, or 100% identical to a polypeptide that begins at any one of amino acids of 1-6 of SEQ ID NO: 577 and ends at any one of amino acids 54-59 of SEQ ID NO: 577, and second hemojuvelin polypeptide domain that is at least 70%, 75%, 80%, 85%, 90%, 91%, 92%, 93%, 94%, 95%, 96%, 97%, 98%, 99%, or 100% identical to a polypeptide that begins at any one of amino acids of 60-72 of SEQ ID NO: 577, and ends at any one of amino acids 248-287 of SEQ ID NO: 577. In some embodiments, the BAMBI:hemojuvelin heteromultimer comprises a polypeptide that is at least 70%, 75%, 80%, 85%, 90%, 91%, 92%, 93%, 94%, 95%, 95%, 96%, 97%, 98%, 99%, or 100% identical to a polypeptide that begins at any one of amino acids of 1-4 of SEQ ID NO: 581 and ends at any one of amino acids 135-200 of SEQ ID NO: 581. In certain preferred embodiments, BAMBI:hemojuvelin heteromultimers are soluble. In some embodiments, a BAMBI:hemojuvelin heteromultimer of the disclosure binds to one or more TGF-beta superfamily ligands (e.g., binds to one or more TGF-beta superfamily ligands with a K_{D} of at least 1×10⁻⁷). In some embodiments, a BAMBI:hemojuvelin heteromultimer of the disclosure inhibits one or more TGF-beta superfamily ligands (e.g., inhibits Smad signaling). Heteromultimer-ligand binding and inhibition may be determined using a variety of assays including, for example, those described herein (e.g., in vitro binding and/or cell-based signaling assays). In some embodiments, a BAMBI:hemojuvelin heteromultimer of the disclosure has a different TGF-beta ligand binding and/or inhibition profile (specificity) compared to a corresponding homomultimer (e.g., BAMBI and hemojuvelin homomultimers). In some embodiments, a BAMBI:hemojuvelin heteromultimer of the disclosure is a heterodimer.

[0212] In certain aspects, the disclosure relates to heteromultimers that comprise at least one BMPER polypeptide, which includes fragments, functional variants, and modified forms thereof, and at least one RGM-A polypeptide, which includes fragments, functional variants, and modified forms thereof. In some embodiments, the BMPER:RGM-A heteromultimer comprises a polypeptide that is at least 70%, 75%, 80%, 85%, 90%, 91%, 92%, 93%, 94%, 95%, 95%, 96%, 97%, 98%, 99%, or 100% identical to the amino acid sequence of any one of SEQ ID NOs: 553 or 554. In some embodiments, the BMPER:RGM-A heteromultimer comprises a polypeptide that is at least 70%, 75%, 80%, 85%, 90%, 91%, 92%, 93%, 94%, 95%, 95%, 96%, 97%, 98%, 99%, or 100% identical to a polypeptide that begins at any one of amino acids of 39-50 of SEQ ID NO: 553 and ends at any one of amino acids 364-369 of SEQ ID NO: 553. In some embodiments, the BMPER:RGM-A heteromultimer comprises a polypeptide that is at least 70%, 75%, 80%, 85%, 90%, 91%, 92%, 93%, 94%, 95%, 95%, 96%, 97%, 98%, 99%, or 100% identical to a polypeptide that begins at any one of amino acids of 370-386 of SEQ ID NO: 553 and ends at any one of amino acids 682-685 of SEQ ID NO: 553. In some embodiments, the BMPER:RGM-A heteromultimer comprises a polypeptide that is at least 70%, 75%, 80%, 85%, 90%, 91%, 92%, 93%, 94%, 95%, 95%, 96%, 97%, 98%, 99%, or 100% identical to a polypeptide that begins at any one of amino acids of 39-50 of SEQ ID NO: 553 and ends at any one of amino acids 682-685 of SEQ ID NO: 553. In some embodiments, the BMPER:RGM-A heteromultimer comprises a BMPER protein, wherein the BMPER protein is a dimer comprising a first polypeptide that is at least 70%, 75%, 80%, 85%, 90%, 91%, 92%, 93%, 94%, 95%, 96%, 97%, 98%, 99%, or 100% identical to a polypeptide that begins at any one of amino acids of 39-50 of SEQ ID NO: 553 and ends at any one of amino acids 364-369 of SEQ ID NO: 553, and second polypeptide that is at least 70%, 75%, 80%, 85%, 90%, 91%, 92%, 93%, 94%, 95%, 96%, 97%, 98%, 99%, or 100% identical to a polypeptide that begins at any one of amino acids of 370-386 of SEQ ID NO: 553, and ends at any one of amino acids 682-685 of SEQ ID NO: 553. In some embodiments, the BMPER:RGM-A heteromultimer comprises a single chain ligand trap that comprises a first BMPER polypeptide domain that is at least 70%, 75%, 80%, 85%, 90%, 91%, 92%, 93%, 94%, 95%, 96%, 97%, 98%, 99%, or 100% identical to a polypeptide that begins at any one of amino acids of 39-50 of SEQ ID NO: 553 and ends at any one of amino acids 364-369 of SEQ ID NO: 553, and second BMPER polypeptide domain that is at least 70%, 75%, 80%, 85%, 90%, 91%, 92%, 93%, 94%, 95%, 96%, 97%, 98%, 99%, or 100% identical to a polypeptide that begins at any one of amino acids of 370-386 of SEQ ID NO: 553 and ends at any one of amino acids 682-685 of SEQ ID NO: 553. In some embodiments, the BMPER:RGM-A heteromultimer comprises a polypeptide that is at least 70%, 75%, 80%, 85%, 90%, 91%, 92%, 93%, 94%, 95%, 95%, 96%, 97%, 98%, 99%, or 100% identical to the amino acid sequence of any one of SEQ ID NOs: 553 or 554. In some embodiments, the BMPER:RGM-A heteromultimer comprises a polypeptide that is at least 70%, 75%, 80%, 85%, 90%, 91%, 92%, 93%, 94%, 95%, 95%, 96%, 97%, 98%, 99%, or 100% identical to a polypeptide that begins at any one of amino acids of 1-177 of SEQ ID NO: 561 and ends at any one of amino acids 430-458 of SEQ ID NO: 561. In some embodiments, the BMPER:RGM-A heteromultimer comprises a polypeptide that is at least 70%, 75%, 80%, 85%, 90%, 91%, 92%, 93%, 94%, 95%, 95%, 96%, 97%, 98%, 99%, or 100% identical to a polypeptide that begins at any one of amino acids of 1-153 of SEQ ID NO: 565 and ends at any one of amino acids 406-434 of SEQ ID NO: 565. In some embodiments, the BMPER:RGM-A heteromultimer comprises a polypeptide that is at least 70%, 75%, 80%, 85%, 90%, 91%, 92%, 93%, 94%, 95%, 95%, 96%, 97%, 98%, 99%, or 100% identical to a polypeptide that begins at any one of amino acids of 1-169 of SEQ ID NO: 569 and ends at any one of amino acids 422-450 of SEQ ID NO: 569. In certain preferred embodiments, BMPER:RGM-A heteromultimers are soluble. In some embodiments, a BMPER:RGM-A heteromultimer of the disclosure binds to one or more TGF-beta superfamily ligands (e.g., binds to one or more TGF-beta superfamily ligands with a K_{D} of at least 1×10⁻⁷). In some embodiments, a BMPER:RGM-A heteromultimer of the disclosure inhibits one or more TGF-beta superfamily ligands (e.g., inhibits Smad signaling). Heteromultimer-ligand binding and inhibition may be determined using a variety of assays including, for example, those described herein (e.g., in vitro binding and/or cell-based signaling assays). In some embodiments, a BMPER:RGM-A heteromultimer of the disclosure has a different TGF-beta ligand binding and/or inhibition profile (specificity) compared to a corresponding homomultimer (e.g., BMPER and RGM-A homomultimers). In some embodiments, a BMPER:RGM-A heteromultimer of the disclosure is a heterodimer.

[0213] In certain aspects, the disclosure relates to heteromultimers that comprise at least one BMPER polypeptide, which includes fragments, functional variants, and modified forms thereof, and at least one RGM-B polypeptide, which includes fragments, functional variants, and modified forms thereof. In some embodiments, the BMPER:RGM-B heteromultimer comprises a polypeptide that is at least 70%, 75%, 80%, 85%, 90%, 91%, 92%, 93%, 94%, 95%, 95%, 96%, 97%, 98%, 99%, or 100% identical to the amino acid sequence of any one of SEQ ID NOs: 553 or 554. In some embodiments, the BMPER:RGM-B heteromultimer comprises a polypeptide that is at least 70%, 75%, 80%, 85%, 90%, 91%, 92%, 93%, 94%, 95%, 95%, 96%, 97%, 98%, 99%, or 100% identical to a polypeptide that begins at any one of amino acids of 39-50 of SEQ ID NO: 553 and ends at any one of amino acids 364-369 of SEQ ID NO: 553. In some embodiments, the BMPER:RGM-B heteromultimer comprises a polypeptide that is at least 70%, 75%, 80%, 85%, 90%, 91%, 92%, 93%, 94%, 95%, 95%, 96%, 97%, 98%, 99%, or 100% identical to a polypeptide that begins at any one of amino acids of 370-386 of SEQ ID NO: 553 and ends at any one of amino acids 682-685 of SEQ ID NO: 553. In some embodiments, the BMPER:RGM-B heteromultimer comprises a polypeptide that is at least 70%, 75%, 80%, 85%, 90%, 91%, 92%, 93%, 94%, 95%, 95%, 96%, 97%, 98%, 99%, or 100% identical to a polypeptide that begins at any one of amino acids of 39-50 of SEQ ID NO: 553 and ends at any one of amino acids 682-685 of SEQ ID NO: 553. In some embodiments, the BMPER:RGM-B heteromultimer comprises a BMPER protein, wherein the BMPER protein is a dimer comprising a first polypeptide that is at least 70%, 75%, 80%, 85%, 90%, 91%, 92%, 93%, 94%, 95%, 96%, 97%, 98%, 99%, or 100% identical to a polypeptide that begins at any one of amino acids of 39-50 of SEQ ID NO: 553 and ends at any one of amino acids 364-369 of SEQ ID NO: 553, and second polypeptide that is at least 70%, 75%, 80%, 85%, 90%, 91%, 92%, 93%, 94%, 95%, 96%, 97%, 98%, 99%, or 100% identical to a polypeptide that begins at any one of amino acids of 370-386 of SEQ ID NO: 553, and ends at any one of amino acids 682-685 of SEQ ID NO: 553. In some embodiments, the BMPER:RGM-B heteromultimer comprises a single chain ligand trap that comprises a first BMPER polypeptide domain that is at least 70%, 75%, 80%, 85%, 90%, 91%, 92%, 93%, 94%, 95%, 96%, 97%, 98%, 99%, or 100% identical to a polypeptide that begins at any one of amino acids of 39-50 of SEQ ID NO: 553 and ends at any one of amino acids 364-369 of SEQ ID NO: 553, and second BMPER polypeptide domain that is at least 70%, 75%, 80%, 85%, 90%, 91%, 92%, 93%, 94%, 95%, 96%, 97%, 98%, 99%, or 100% identical to a polypeptide that begins at any one of amino acids of 370-386 of SEQ ID NO: 553 and ends at any one of amino acids 682-685 of SEQ ID NO: 553. In some embodiments, the BMPER:RGM-B heteromultimer comprises a polypeptide that is at least 70%, 75%, 80%, 85%, 90%, 91%, 92%, 93%, 94%, 95%, 95%, 96%, 97%, 98%, 99%, or 100% identical to the amino acid sequence of any one of SEQ ID NOs: 557 or 558. In some embodiments, the BMPER:RGM-B heteromultimer comprises a polypeptide that is at least 70%, 75%, 80%, 85%, 90%, 91%, 92%, 93%, 94%, 95%, 95%, 96%, 97%, 98%, 99%, or 100% identical to a polypeptide that begins at any one of amino acids of 1-87 of SEQ ID NO: 557 and ends at any one of amino acids 452-478 of SEQ ID NO: 557. In some embodiments, the BMPER:RGM-B heteromultimer comprises a polypeptide that is at least 70%, 75%, 80%, 85%, 90%, 91%, 92%, 93%, 94%, 95%, 95%, 96%, 97%, 98%, 99%, or 100% identical to a polypeptide that begins at any one of amino acids of 210-222 of SEQ ID NO: 557 and ends at any one of amino acids 413-452 of SEQ ID NO: 557. In some embodiments, the BMPER:RGM-B heteromultimer comprises a polypeptide that is at least 70%, 75%, 80%, 85%, 90%, 91%, 92%, 93%, 94%, 95%, 95%, 96%, 97%, 98%, 99%, or 100% identical to a polypeptide that begins at any one of amino acids of 87-95 of SEQ ID NO: 557 and ends at any one of amino acids 204-209 of SEQ ID NO: 557. In some embodiments, the BMPER:RGM-B heteromultimer comprises a RGM-B protein, wherein the RGM-B protein is a dimer comprising a first polypeptide that is at least 70%, 75%, 80%, 85%, 90%, 91%, 92%, 93%, 94%, 95%, 96%, 97%, 98%, 99%, or 100% identical to a polypeptide that begins at any one of amino acids of 87-95 of SEQ ID NO: 557 and ends at any one of amino acids 204-209 of SEQ ID NO: 557 and second polypeptide that is at least 70%, 75%, 80%, 85%, 90%, 91%, 92%, 93%, 94%, 95%, 96%, 97%, 98%, 99%, or 100% identical to a polypeptide that begins at any one of amino acids of 210-222 of SEQ ID NO: 557 and ends at any one of amino acids 413-452 of SEQ ID NO: 557. In some embodiments, the BMPER:RGM-B heteromultimer comprises a single chain ligand trap that comprises a first RGM-B polypeptide domain that is at least 70%, 75%, 80%, 85%, 90%, 91%, 92%, 93%, 94%, 95%, 96%, 97%, 98%, 99%, or 100% identical to a polypeptide that begins at any one of amino acids of 87-95 of SEQ ID NO: 557 and ends at any one of amino acids 204-209 of SEQ ID NO: 557 and second RGM-B polypeptide domain that is at least 70%, 75%, 80%, 85%, 90%, 91%, 92%, 93%, 94%, 95%, 96%, 97%, 98%, 99%, or 100% identical to a polypeptide that begins at any one of amino acids of 210-222 of SEQ ID NO: 557 and ends at any one of amino acids 413-452 of SEQ ID NO: 557. In certain preferred embodiments, BMPER:RGM-B heteromultimers are soluble. In some embodiments, a BMPER:RGM-B heteromultimer of the disclosure binds to one or more TGF-beta superfamily ligands (e.g., binds to one or more TGF-beta superfamily ligands with a K_{D} of at least 1×10⁻⁷). In some embodiments, a BMPER:RGM-B heteromultimer of the disclosure inhibits one or more TGF-beta superfamily ligands (e.g., inhibits Smad signaling). Heteromultimer-ligand binding and inhibition may be determined using a variety of assays including, for example, those described herein (e.g., in vitro binding and/or cell-based signaling assays). In some embodiments, a BMPER:RGM-B heteromultimer of the disclosure has a different TGF-beta ligand binding and/or inhibition profile (specificity) compared to a corresponding homomultimer (e.g., BMPER and RGM-B homomultimers). In some embodiments, a BMPER:RGM-B heteromultimer of the disclosure is a heterodimer.

[0214] In certain aspects, the disclosure relates to heteromultimers that comprise at least one BMPER polypeptide, which includes fragments, functional variants, and modified forms thereof, and at least one hemojuvelin polypeptide, which includes fragments, functional variants, and modified forms thereof. In some embodiments, the BMPER:hemojuvelin heteromultimer comprises a polypeptide that is at least 70%, 75%, 80%, 85%, 90%, 91%, 92%, 93%, 94%, 95%, 95%, 96%, 97%, 98%, 99%, or 100% identical to the amino acid sequence of any one of SEQ ID NOs: 553 or 554. In some embodiments, the BMPER:hemojuvelin heteromultimer comprises a polypeptide that is at least 70%, 75%, 80%, 85%, 90%, 91%, 92%, 93%, 94%, 95%, 95%, 96%, 97%, 98%, 99%, or 100% identical to a polypeptide that begins at any one of amino acids of 39-50 of SEQ ID NO: 553 and ends at any one of amino acids 364-369 of SEQ ID NO: 553. In some embodiments, the BMPER:hemojuvelin heteromultimer comprises a polypeptide that is at least 70%, 75%, 80%, 85%, 90%, 91%, 92%, 93%, 94%, 95%, 95%, 96%, 97%, 98%, 99%, or 100% identical to a polypeptide that begins at any one of amino acids of 370-386 of SEQ ID NO: 553 and ends at any one of amino acids 682-685 of SEQ ID NO: 553. In some embodiments, the BMPER:hemojuvelin heteromultimer comprises a polypeptide that is at least 70%, 75%, 80%, 85%, 90%, 91%, 92%, 93%, 94%, 95%, 95%, 96%, 97%, 98%, 99%, or 100% identical to a polypeptide that begins at any one of amino acids of 39-50 of SEQ ID NO: 553 and ends at any one of amino acids 682-685 of SEQ ID NO: 553. In some embodiments, the BMPER:hemojuvelin heteromultimer comprises a BMPER protein, wherein the BMPER protein is a dimer comprising a first polypeptide that is at least 70%, 75%, 80%, 85%, 90%, 91%, 92%, 93%, 94%, 95%, 96%, 97%, 98%, 99%, or 100% identical to a polypeptide that begins at any one of amino acids of 39-50 of SEQ ID NO: 553 and ends at any one of amino acids 364-369 of SEQ ID NO: 553, and second polypeptide that is at least 70%, 75%, 80%, 85%, 90%, 91%, 92%, 93%, 94%, 95%, 96%, 97%, 98%, 99%, or 100% identical to a polypeptide that begins at any one of amino acids of 370-386 of SEQ ID NO: 553, and ends at any one of amino acids 682-685 of SEQ ID NO: 553. In some embodiments, the BMPER:hemojuvelin heteromultimer comprises a single chain ligand trap that comprises a first BMPER polypeptide domain that is at least 70%, 75%, 80%, 85%, 90%, 91%, 92%, 93%, 94%, 95%, 96%, 97%, 98%, 99%, or 100% identical to a polypeptide that begins at any one of amino acids of 39-50 of SEQ ID NO: 553 and ends at any one of amino acids 364-369 of SEQ ID NO: 553, and second BMPER polypeptide domain that is at least 70%, 75%, 80%, 85%, 90%, 91%, 92%, 93%, 94%, 95%, 96%, 97%, 98%, 99%, or 100% identical to a polypeptide that begins at any one of amino acids of 370-386 of SEQ ID NO: 553 and ends at any one of amino acids 682-685 of SEQ ID NO: 553. In some embodiments, the BMPER:hemojuvelin heteromultimer comprises a polypeptide that is at least 70%, 75%, 80%, 85%, 90%, 91%, 92%, 93%, 94%, 95%, 95%, 96%, 97%, 98%, 99%, or 100% identical to the amino acid sequence of any one of SEQ ID NOs: 573, 574, 577, 578, 581, or 582. In some embodiments, the BMPER:hemojuvelin heteromultimer comprises a polypeptide that is at least 70%, 75%, 80%, 85%, 90%, 91%, 92%, 93%, 94%, 95%, 95%, 96%, 97%, 98%, 99%, or 100% identical to a polypeptide that begins at any one of amino acids of 1-36 of SEQ ID NO: 573 and ends at any one of amino acids 400-426 of SEQ ID NO: 573. In some embodiments, the BMPER:hemojuvelin heteromultimer comprises a polypeptide that is at least 70%, 75%, 80%, 85%, 90%, 91%, 92%, 93%, 94%, 95%, 95%, 96%, 97%, 98%, 99%, or 100% identical to a polypeptide that begins at any one of amino acids of 36-42 of SEQ ID NO: 573 and ends at any one of amino acids 167-172 of SEQ ID NO: 573. In some embodiments, the BMPER:hemojuvelin heteromultimer comprises a polypeptide that is at least 70%, 75%, 80%, 85%, 90%, 91%, 92%, 93%, 94%, 95%, 95%, 96%, 97%, 98%, 99%, or 100% identical to a polypeptide that begins at any one of amino acids of 173-185 of SEQ ID NO: 573 and ends at any one of amino acids 361-400 of SEQ ID NO: 573. In some embodiments, the BMPER:hemojuvelin heteromultimer comprises a hemojuvelin protein that is a dimer comprising a first polypeptide that is at least 70%, 75%, 80%, 85%, 90%, 91%, 92%, 93%, 94%, 95%, 96%, 97%, 98%, 99%, or 100% identical to a polypeptide that begins at any one of amino acids of 36-42 of SEQ ID NO: 573, and ends at any one of amino acids 167-172 of SEQ ID NO: 573 and second polypeptide that is at least 70%, 75%, 80%, 85%, 90%, 91%, 92%, 93%, 94%, 95%, 96%, 97%, 98%, 99%, or 100% identical to a polypeptide that begins at any one of amino acids of 173-185 of SEQ ID NO: 573 and ends at any one of amino acids 361-400 of SEQ ID NO: 573. In some embodiments, the BMPER:hemojuvelin heteromultimer comprises a single chain ligand trap that comprises a first hemojuvelin polypeptide domain that is at least 70%, 75%, 80%, 85%, 90%, 91%, 92%, 93%, 94%, 95%, 96%, 97%, 98%, 99%, or 100% identical to a polypeptide that begins at any one of amino acids of 36-42 of SEQ ID NO: 573 and ends at any one of amino acids 167-172 of SEQ ID NO: 573 and second hemojuvelin polypeptide domain that is at least 70%, 75%, 80%, 85%, 90%, 91%, 92%, 93%, 94%, 95%, 96%, 97%, 98%, 99%, or 100% identical to a polypeptide that begins at any one of amino acids of 173-185 of SEQ ID NO: 573 and ends at any one of amino acids 361-400 of SEQ ID NO: 573. In some embodiments, the BMPER:hemojuvelin heteromultimer comprises a polypeptide that is at least 70%, 75%, 80%, 85%, 90%, 91%, 92%, 93%, 94%, 95%, 95%, 96%, 97%, 98%, 99%, or 100% identical to a polypeptide that begins at any one of amino acids of 1-6 of SEQ ID NO: 577 and ends at any one of amino acids 287-313 of SEQ ID NO: 577. In some embodiments, the BMPER:hemojuvelin heteromultimer comprises a polypeptide that is at least 70%, 75%, 80%, 85%, 90%, 91%, 92%, 93%, 94%, 95%, 95%, 96%, 97%, 98%, 99%, or 100% identical to a polypeptide that begins at any one of amino acids of 1-6 of SEQ ID NO: 577 and ends at any one of amino acids 54-59 of SEQ ID NO: 577. In some embodiments, the BMPER:hemojuvelin heteromultimer comprises a polypeptide that is at least 70%, 75%, 80%, 85%, 90%, 91%, 92%, 93%, 94%, 95%, 95%, 96%, 97%, 98%, 99%, or 100% identical to a polypeptide that begins at any one of amino acids of 60-72 of SEQ ID NO: 577 and ends at any one of amino acids 248-287 of SEQ ID NO: 577. In some embodiments, the BMPER:hemojuvelin heteromultimer comprises a hemojuvelin protein, wherein the hemojuvelin protein is a dimer comprising a first polypeptide that is at least 70%, 75%, 80%, 85%, 90%, 91%, 92%, 93%, 94%, 95%, 96%, 97%, 98%, 99%, or 100% identical to a polypeptide that begins at any one of amino acids of 1-6 of SEQ ID NO: 577 and ends at any one of amino acids 54-59 of SEQ ID NO: 577, and second polypeptide that is at least 70%, 75%, 80%, 85%, 90%, 91%, 92%, 93%, 94%, 95%, 96%, 97%, 98%, 99%, or 100% identical to a polypeptide that begins at any one of amino acids of 60-72 of SEQ ID NO: 577 and ends at any one of amino acids 248-287 of SEQ ID NO: 577. In some embodiments, the BMPER:hemojuvelin heteromultimer comprises a single chain ligand trap that comprises a first hemojuvelin polypeptide domain that is at least 70%, 75%, 80%, 85%, 90%, 91%, 92%, 93%, 94%, 95%, 96%, 97%, 98%, 99%, or 100% identical to a polypeptide that begins at any one of amino acids of 1-6 of SEQ ID NO: 577 and ends at any one of amino acids 54-59 of SEQ ID NO: 577, and second hemojuvelin polypeptide domain that is at least 70%, 75%, 80%, 85%, 90%, 91%, 92%, 93%, 94%, 95%, 96%, 97%, 98%, 99%, or 100% identical to a polypeptide that begins at any one of amino acids of 60-72 of SEQ ID NO: 577, and ends at any one of amino acids 248-287 of SEQ ID NO: 577. In some embodiments, the BMPER:hemojuvelin heteromultimer comprises a polypeptide that is at least 70%, 75%, 80%, 85%, 90%, 91%, 92%, 93%, 94%, 95%, 95%, 96%, 97%, 98%, 99%, or 100% identical to a polypeptide that begins at any one of amino acids of 1-4 of SEQ ID NO: 581 and ends at any one of amino acids 135-200 of SEQ ID NO: 581. In certain preferred embodiments, BMPER:hemojuvelin heteromultimers are soluble. In some embodiments, a BMPER:hemojuvelin heteromultimer of the disclosure binds to one or more TGF-beta superfamily ligands (e.g., binds to one or more TGF-beta superfamily ligands with a K_{D} of at least 1×10⁻⁷). In some embodiments, a BMPER:hemojuvelin heteromultimer of the disclosure inhibits one or more TGF-beta superfamily ligands (e.g., inhibits Smad signaling). Heteromultimer-ligand binding and inhibition may be determined using a variety of assays including, for example, those described herein (e.g., in vitro binding and/or cell-based signaling assays). In some embodiments, a BMPER:hemojuvelin heteromultimer of the disclosure has a different TGF-beta ligand binding and/or inhibition profile (specificity) compared to a corresponding homomultimer (e.g., BMPER and hemojuvelin homomultimers). In some embodiments, a BMPER:hemojuvelin heteromultimer of the disclosure is a heterodimer.

[0215] In certain aspects, the disclosure relates to heteromultimers that comprise at least one RGM-A polypeptide, which includes fragments, functional variants, and modified forms thereof, and at least one RGM-B polypeptide, which includes fragments, functional variants, and modified forms thereof. In some embodiments, the RGM-A:RGM-B heteromultimer comprises a polypeptide that is at least 70%, 75%, 80%, 85%, 90%, 91%, 92%, 93%, 94%, 95%, 95%, 96%, 97%, 98%, 99%, or 100% identical to the amino acid sequence of any one of SEQ ID NOs: 553 or 554. In some embodiments, the RGM-A:RGM-B heteromultimer comprises a polypeptide that is at least 70%, 75%, 80%, 85%, 90%, 91%, 92%, 93%, 94%, 95%, 95%, 96%, 97%, 98%, 99%, or 100% identical to a polypeptide that begins at any one of amino acids of 1-177 of SEQ ID NO: 561 and ends at any one of amino acids 430-458 of SEQ ID NO: 561. In some embodiments, the RGM-A:RGM-B heteromultimer comprises a polypeptide that is at least 70%, 75%, 80%, 85%, 90%, 91%, 92%, 93%, 94%, 95%, 95%, 96%, 97%, 98%, 99%, or 100% identical to a polypeptide that begins at any one of amino acids of 1-153 of SEQ ID NO: 565 and ends at any one of amino acids 406-434 of SEQ ID NO: 565. In some embodiments, the RGM-A:RGM-B heteromultimer comprises a polypeptide that is at least 70%, 75%, 80%, 85%, 90%, 91%, 92%, 93%, 94%, 95%, 95%, 96%, 97%, 98%, 99%, or 100% identical to a polypeptide that begins at any one of amino acids of 1-169 of SEQ ID NO: 569 and ends at any one of amino acids 422-450 of SEQ ID NO: 569. In some embodiments, the RGM-A:RGM-B heteromultimer comprises a polypeptide that is at least 70%, 75%, 80%, 85%, 90%, 91%, 92%, 93%, 94%, 95%, 95%, 96%, 97%, 98%, 99%, or 100% identical to the amino acid sequence of any one of SEQ ID NOs: 557 or 558. In some embodiments, the RGM-A:RGM-B heteromultimer comprises a polypeptide that is at least 70%, 75%, 80%, 85%, 90%, 91%, 92%, 93%, 94%, 95%, 95%, 96%, 97%, 98%, 99%, or 100% identical to a polypeptide that begins at any one of amino acids of 1-87 of SEQ ID NO: 557 and ends at any one of amino acids 452-478 of SEQ ID NO: 557. In some embodiments, the RGM-A:RGM-B heteromultimer comprises a polypeptide that is at least 70%, 75%, 80%, 85%, 90%, 91%, 92%, 93%, 94%, 95%, 95%, 96%, 97%, 98%, 99%, or 100% identical to a polypeptide that begins at any one of amino acids of 210-222 of SEQ ID NO: 557 and ends at any one of amino acids 413-452 of SEQ ID NO: 557. In some embodiments, the RGM-A:RGM-B heteromultimer comprises a polypeptide that is at least 70%, 75%, 80%, 85%, 90%, 91%, 92%, 93%, 94%, 95%, 95%, 96%, 97%, 98%, 99%, or 100% identical to a polypeptide that begins at any one of amino acids of 87-95 of SEQ ID NO: 557 and ends at any one of amino acids 204-209 of SEQ ID NO: 557. In some embodiments, the RGM-A:RGM-B heteromultimer comprises a RGM-B protein, wherein the RGM-B protein is a dimer comprising a first polypeptide that is at least 70%, 75%, 80%, 85%, 90%, 91%, 92%, 93%, 94%, 95%, 96%, 97%, 98%, 99%, or 100% identical to a polypeptide that begins at any one of amino acids of 87-95 of SEQ ID NO: 557 and ends at any one of amino acids 204-209 of SEQ ID NO: 557 and second polypeptide that is at least 70%, 75%, 80%, 85%, 90%, 91%, 92%, 93%, 94%, 95%, 96%, 97%, 98%, 99%, or 100% identical to a polypeptide that begins at any one of amino acids of 210-222 of SEQ ID NO: 557 and ends at any one of amino acids 413-452 of SEQ ID NO: 557. In some embodiments, the RGM-A:RGM-B heteromultimer comprises a single chain ligand trap that comprises a first RGM-B polypeptide domain that is at least 70%, 75%, 80%, 85%, 90%, 91%, 92%, 93%, 94%, 95%, 96%, 97%, 98%, 99%, or 100% identical to a polypeptide that begins at any one of amino acids of 87-95 of SEQ ID NO: 557 and ends at any one of amino acids 204-209 of SEQ ID NO: 557 and second RGM-B polypeptide domain that is at least 70%, 75%, 80%, 85%, 90%, 91%, 92%, 93%, 94%, 95%, 96%, 97%, 98%, 99%, or 100% identical to a polypeptide that begins at any one of amino acids of 210-222 of SEQ ID NO: 557 and ends at any one of amino acids 413-452 of SEQ ID NO: 557. In certain preferred embodiments, RGM-A:RGM-B heteromultimers are soluble. In some embodiments, a RGM-A:RGM-B heteromultimer of the disclosure binds to one or more TGF-beta superfamily ligands (e.g., binds to one or more TGF-beta superfamily ligands with a K_{D} of at least 1×10⁻⁷). In some embodiments, a RGM-A:RGM-B heteromultimer of the disclosure inhibits one or more TGF-beta superfamily ligands (e.g., inhibits Smad signaling). Heteromultimer-ligand binding and inhibition may be determined using a variety of assays including, for example, those described herein (e.g., in vitro binding and/or cell-based signaling assays). In some embodiments, a RGM-A:RGM-B heteromultimer of the disclosure has a different TGF-beta ligand binding and/or inhibition profile (specificity) compared to a corresponding homomultimer (e.g., RGM-A and RGM-B homomultimers). In some embodiments, a RGM-A:RGM-B heteromultimer of the disclosure is a heterodimer.

[0216] In certain aspects, the disclosure relates to heteromultimers that comprise at least one RGM-A polypeptide, which includes fragments, functional variants, and modified forms thereof, and at least one hemojuvelin polypeptide, which includes fragments, functional variants, and modified forms thereof. In some embodiments, the RGM-A:hemojuvelin heteromultimer comprises a polypeptide that is at least 70%, 75%, 80%, 85%, 90%, 91%, 92%, 93%, 94%, 95%, 95%, 96%, 97%, 98%, 99%, or 100% identical to the amino acid sequence of any one of SEQ ID NOs: 553 or 554. In some embodiments, the RGM-A:hemojuvelin heteromultimer comprises a polypeptide that is at least 70%, 75%, 80%, 85%, 90%, 91%, 92%, 93%, 94%, 95%, 95%, 96%, 97%, 98%, 99%, or 100% identical to a polypeptide that begins at any one of amino acids of 1-177 of SEQ ID NO: 561 and ends at any one of amino acids 430-458 of SEQ ID NO: 561. In some embodiments, the RGM-A:hemojuvelin heteromultimer comprises a polypeptide that is at least 70%, 75%, 80%, 85%, 90%, 91%, 92%, 93%, 94%, 95%, 95%, 96%, 97%, 98%, 99%, or 100% identical to a polypeptide that begins at any one of amino acids of 1-153 of SEQ ID NO: 565 and ends at any one of amino acids 406-434 of SEQ ID NO: 565. In some embodiments, the RGM-A:hemojuvelin heteromultimer comprises a polypeptide that is at least 70%, 75%, 80%, 85%, 90%, 91%, 92%, 93%, 94%, 95%, 95%, 96%, 97%, 98%, 99%, or 100% identical to a polypeptide that begins at any one of amino acids of 1-169 of SEQ ID NO: 569 and ends at any one of amino acids 422-450 of SEQ ID NO: 569. In some embodiments, the RGM-A:hemojuvelin heteromultimer comprises a polypeptide that is at least 70%, 75%, 80%, 85%, 90%, 91%, 92%, 93%, 94%, 95%, 95%, 96%, 97%, 98%, 99%, or 100% identical to the amino acid sequence of any one of SEQ ID NOs: 573, 574, 577, 578, 581, or 582. In some embodiments, the RGM-A:hemojuvelin heteromultimer comprises a polypeptide that is at least 70%, 75%, 80%, 85%, 90%, 91%, 92%, 93%, 94%, 95%, 95%, 96%, 97%, 98%, 99%, or 100% identical to a polypeptide that begins at any one of amino acids of 1-36 of SEQ ID NO: 573 and ends at any one of amino acids 400-426 of SEQ ID NO: 573. In some embodiments, the RGM-A:hemojuvelin heteromultimer comprises a polypeptide that is at least 70%, 75%, 80%, 85%, 90%, 91%, 92%, 93%, 94%, 95%, 95%, 96%, 97%, 98%, 99%, or 100% identical to a polypeptide that begins at any one of amino acids of 36-42 of SEQ ID NO: 573 and ends at any one of amino acids 167-172 of SEQ ID NO: 573. In some embodiments, the RGM-A:hemojuvelin heteromultimer comprises a polypeptide that is at least 70%, 75%, 80%, 85%, 90%, 91%, 92%, 93%, 94%, 95%, 95%, 96%, 97%, 98%, 99%, or 100% identical to a polypeptide that begins at any one of amino acids of 173-185 of SEQ ID NO: 573 and ends at any one of amino acids 361-400 of SEQ ID NO: 573. In some embodiments, the RGM-A:hemojuvelin heteromultimer comprises a hemojuvelin protein that is a dimer comprising a first polypeptide that is at least 70%, 75%, 80%, 85%, 90%, 91%, 92%, 93%, 94%, 95%, 96%, 97%, 98%, 99%, or 100% identical to a polypeptide that begins at any one of amino acids of 36-42 of SEQ ID NO: 573, and ends at any one of amino acids 167-172 of SEQ ID NO: 573 and second polypeptide that is at least 70%, 75%, 80%, 85%, 90%, 91%, 92%, 93%, 94%, 95%, 96%, 97%, 98%, 99%, or 100% identical to a polypeptide that begins at any one of amino acids of 173-185 of SEQ ID NO: 573 and ends at any one of amino acids 361-400 of SEQ ID NO: 573. In some embodiments, the RGM-A:hemojuvelin heteromultimer comprises a single chain ligand trap that comprises a first hemojuvelin polypeptide domain that is at least 70%, 75%, 80%, 85%, 90%, 91%, 92%, 93%, 94%, 95%, 96%, 97%, 98%, 99%, or 100% identical to a polypeptide that begins at any one of amino acids of 36-42 of SEQ ID NO: 573 and ends at any one of amino acids 167-172 of SEQ ID NO: 573 and second hemojuvelin polypeptide domain that is at least 70%, 75%, 80%, 85%, 90%, 91%, 92%, 93%, 94%, 95%, 96%, 97%, 98%, 99%, or 100% identical to a polypeptide that begins at any one of amino acids of 173-185 of SEQ ID NO: 573 and ends at any one of amino acids 361-400 of SEQ ID NO: 573. In some embodiments, the RGM-A:hemojuvelin heteromultimer comprises a polypeptide that is at least 70%, 75%, 80%, 85%, 90%, 91%, 92%, 93%, 94%, 95%, 95%, 96%, 97%, 98%, 99%, or 100% identical to a polypeptide that begins at any one of amino acids of 1-6 of SEQ ID NO: 577 and ends at any one of amino acids 287-313 of SEQ ID NO: 577. In some embodiments, the RGM-A:hemojuvelin heteromultimer comprises a polypeptide that is at least 70%, 75%, 80%, 85%, 90%, 91%, 92%, 93%, 94%, 95%, 95%, 96%, 97%, 98%, 99%, or 100% identical to a polypeptide that begins at any one of amino acids of 1-6 of SEQ ID NO: 577 and ends at any one of amino acids 54-59 of SEQ ID NO: 577. In some embodiments, the RGM-A:hemojuvelin heteromultimer comprises a polypeptide that is at least 70%, 75%, 80%, 85%, 90%, 91%, 92%, 93%, 94%, 95%, 95%, 96%, 97%, 98%, 99%, or 100% identical to a polypeptide that begins at any one of amino acids of 60-72 of SEQ ID NO: 577 and ends at any one of amino acids 248-287 of SEQ ID NO: 577. In some embodiments, the RGM-A:hemojuvelin heteromultimer comprises a hemojuvelin protein, wherein the hemojuvelin protein is a dimer comprising a first polypeptide that is at least 70%, 75%, 80%, 85%, 90%, 91%, 92%, 93%, 94%, 95%, 96%, 97%, 98%, 99%, or 100% identical to a polypeptide that begins at any one of amino acids of 1-6 of SEQ ID NO: 577 and ends at any one of amino acids 54-59 of SEQ ID NO: 577, and second polypeptide that is at least 70%, 75%, 80%, 85%, 90%, 91%, 92%, 93%, 94%, 95%, 96%, 97%, 98%, 99%, or 100% identical to a polypeptide that begins at any one of amino acids of 60-72 of SEQ ID NO: 577 and ends at any one of amino acids 248-287 of SEQ ID NO: 577. In some embodiments, the RGM-A:hemojuvelin heteromultimer comprises a single chain ligand trap that comprises a first hemojuvelin polypeptide domain that is at least 70%, 75%, 80%, 85%, 90%, 91%, 92%, 93%, 94%, 95%, 96%, 97%, 98%, 99%, or 100% identical to a polypeptide that begins at any one of amino acids of 1-6 of SEQ ID NO: 577 and ends at any one of amino acids 54-59 of SEQ ID NO: 577, and second hemojuvelin polypeptide domain that is at least 70%, 75%, 80%, 85%, 90%, 91%, 92%, 93%, 94%, 95%, 96%, 97%, 98%, 99%, or 100% identical to a polypeptide that begins at any one of amino acids of 60-72 of SEQ ID NO: 577, and ends at any one of amino acids 248-287 of SEQ ID NO: 577. In some embodiments, the RGM-A:hemojuvelin heteromultimer comprises a polypeptide that is at least 70%, 75%, 80%, 85%, 90%, 91%, 92%, 93%, 94%, 95%, 95%, 96%, 97%, 98%, 99%, or 100% identical to a polypeptide that begins at any one of amino acids of 1-4 of SEQ ID NO: 581 and ends at any one of amino acids 135-200 of SEQ ID NO: 581. In certain preferred embodiments, RGM-A:hemojuvelin heteromultimers are soluble. In some embodiments, a RGM-A:hemojuvelin heteromultimer of the disclosure binds to one or more TGF-beta superfamily ligands (e.g., binds to one or more TGF-beta superfamily ligands with a K_{D} of at least 1×10⁻⁷). In some embodiments, a RGM-A:hemojuvelin heteromultimer of the disclosure inhibits one or more TGF-beta superfamily ligands (e.g., inhibits Smad signaling). Heteromultimer-ligand binding and inhibition may be determined using a variety of assays including, for example, those described herein (e.g., in vitro binding and/or cell-based signaling assays). In some embodiments, a RGM-A:hemojuvelin heteromultimer of the disclosure has a different TGF-beta ligand binding and/or inhibition profile (specificity) compared to a corresponding homomultimer (e.g., RGM-A and hemojuvelin homomultimers). In some embodiments, a RGM-A:hemojuvelin heteromultimer of the disclosure is a heterodimer.

[0217] In certain aspects, the disclosure relates to heteromultimers that comprise at least one RGM-B polypeptide, which includes fragments, functional variants, and modified forms thereof, and at least one hemojuvelin polypeptide, which includes fragments, functional variants, and modified forms thereof. In some embodiments, the RGM-B:hemojuvelin heteromultimer comprises a polypeptide that is at least 70%, 75%, 80%, 85%, 90%, 91%, 92%, 93%, 94%, 95%, 95%, 96%, 97%, 98%, 99%, or 100% identical to the amino acid sequence of any one of SEQ ID NOs: 557 or 558. In some embodiments, the RGM-B:hemojuvelin heteromultimer comprises a polypeptide that is at least 70%, 75%, 80%, 85%, 90%, 91%, 92%, 93%, 94%, 95%, 95%, 96%, 97%, 98%, 99%, or 100% identical to a polypeptide that begins at any one of amino acids of 1-87 of SEQ ID NO: 557 and ends at any one of amino acids 452-478 of SEQ ID NO: 557. In some embodiments, the RGM-B:hemojuvelin heteromultimer comprises a polypeptide that is at least 70%, 75%, 80%, 85%, 90%, 91%, 92%, 93%, 94%, 95%, 95%, 96%, 97%, 98%, 99%, or 100% identical to a polypeptide that begins at any one of amino acids of 210-222 of SEQ ID NO: 557 and ends at any one of amino acids 413-452 of SEQ ID NO: 557. In some embodiments, the RGM-B:hemojuvelin heteromultimer comprises a polypeptide that is at least 70%, 75%, 80%, 85%, 90%, 91%, 92%, 93%, 94%, 95%, 95%, 96%, 97%, 98%, 99%, or 100% identical to a polypeptide that begins at any one of amino acids of 87-95 of SEQ ID NO: 557 and ends at any one of amino acids 204-209 of SEQ ID NO: 557. In some embodiments, the RGM-B:hemojuvelin heteromultimer comprises a RGM-B protein, wherein the RGM-B protein is a dimer comprising a first polypeptide that is at least 70%, 75%, 80%, 85%, 90%, 91%, 92%, 93%, 94%, 95%, 96%, 97%, 98%, 99%, or 100% identical to a polypeptide that begins at any one of amino acids of 87-95 of SEQ ID NO: 557 and ends at any one of amino acids 204-209 of SEQ ID NO: 557 and second polypeptide that is at least 70%, 75%, 80%, 85%, 90%, 91%, 92%, 93%, 94%, 95%, 96%, 97%, 98%, 99%, or 100% identical to a polypeptide that begins at any one of amino acids of 210-222 of SEQ ID NO: 557 and ends at any one of amino acids 413-452 of SEQ ID NO: 557. In some embodiments, the RGM-B:hemojuvelin heteromultimer comprises a single chain ligand trap that comprises a first RGM-B polypeptide domain that is at least 70%, 75%, 80%, 85%, 90%, 91%, 92%, 93%, 94%, 95%, 96%, 97%, 98%, 99%, or 100% identical to a polypeptide that begins at any one of amino acids of 87-95 of SEQ ID NO: 557 and ends at any one of amino acids 204-209 of SEQ ID NO: 557 and second RGM-B polypeptide domain that is at least 70%, 75%, 80%, 85%, 90%, 91%, 92%, 93%, 94%, 95%, 96%, 97%, 98%, 99%, or 100% identical to a polypeptide that begins at any one of amino acids of 210-222 of SEQ ID NO: 557 and ends at any one of amino acids 413-452 of SEQ ID NO: 557. In some embodiments, the RGM-B:hemojuvelin heteromultimer comprises a polypeptide that is at least 70%, 75%, 80%, 85%, 90%, 91%, 92%, 93%, 94%, 95%, 95%, 96%, 97%, 98%, 99%, or 100% identical to the amino acid sequence of any one of SEQ ID NOs: 573, 574, 577, 578, 581, or 582. In some embodiments, the RGM-B:hemojuvelin heteromultimer comprises a polypeptide that is at least 70%, 75%, 80%, 85%, 90%, 91%, 92%, 93%, 94%, 95%, 95%, 96%, 97%, 98%, 99%, or 100% identical to a polypeptide that begins at any one of amino acids of 1-36 of SEQ ID NO: 573 and ends at any one of amino acids 400-426 of SEQ ID NO: 573. In some embodiments, the RGM-B:hemojuvelin heteromultimer comprises a polypeptide that is at least 70%, 75%, 80%, 85%, 90%, 91%, 92%, 93%, 94%, 95%, 95%, 96%, 97%, 98%, 99%, or 100% identical to a polypeptide that begins at any one of amino acids of 36-42 of SEQ ID NO: 573 and ends at any one of amino acids 167-172 of SEQ ID NO: 573. In some embodiments, the RGM-B:hemojuvelin heteromultimer comprises a polypeptide that is at least 70%, 75%, 80%, 85%, 90%, 91%, 92%, 93%, 94%, 95%, 95%, 96%, 97%, 98%, 99%, or 100% identical to a polypeptide that begins at any one of amino acids of 173-185 of SEQ ID NO: 573 and ends at any one of amino acids 361-400 of SEQ ID NO: 573. In some embodiments, the RGM-B:hemojuvelin heteromultimer comprises a hemojuvelin protein that is a dimer comprising a first polypeptide that is at least 70%, 75%, 80%, 85%, 90%, 91%, 92%, 93%, 94%, 95%, 96%, 97%, 98%, 99%, or 100% identical to a polypeptide that begins at any one of amino acids of 36-42 of SEQ ID NO: 573, and ends at any one of amino acids 167-172 of SEQ ID NO: 573 and second polypeptide that is at least 70%, 75%, 80%, 85%, 90%, 91%, 92%, 93%, 94%, 95%, 96%, 97%, 98%, 99%, or 100% identical to a polypeptide that begins at any one of amino acids of 173-185 of SEQ ID NO: 573 and ends at any one of amino acids 361-400 of SEQ ID NO: 573. In some embodiments, the RGM-B:hemojuvelin heteromultimer comprises a single chain ligand trap that comprises a first hemojuvelin polypeptide domain that is at least 70%, 75%, 80%, 85%, 90%, 91%, 92%, 93%, 94%, 95%, 96%, 97%, 98%, 99%, or 100% identical to a polypeptide that begins at any one of amino acids of 36-42 of SEQ ID NO: 573 and ends at any one of amino acids 167-172 of SEQ ID NO: 573 and second hemojuvelin polypeptide domain that is at least 70%, 75%, 80%, 85%, 90%, 91%, 92%, 93%, 94%, 95%, 96%, 97%, 98%, 99%, or 100% identical to a polypeptide that begins at any one of amino acids of 173-185 of SEQ ID NO: 573 and ends at any one of amino acids 361-400 of SEQ ID NO: 573. In some embodiments, the RGM-B:hemojuvelin heteromultimer comprises a polypeptide that is at least 70%, 75%, 80%, 85%, 90%, 91%, 92%, 93%, 94%, 95%, 95%, 96%, 97%, 98%, 99%, or 100% identical to a polypeptide that begins at any one of amino acids of 1-6 of SEQ ID NO: 577 and ends at any one of amino acids 287-313 of SEQ ID NO: 577. In some embodiments, the RGM-B:hemojuvelin heteromultimer comprises a polypeptide that is at least 70%, 75%, 80%, 85%, 90%, 91%, 92%, 93%, 94%, 95%, 95%, 96%, 97%, 98%, 99%, or 100% identical to a polypeptide that begins at any one of amino acids of 1-6 of SEQ ID NO: 577 and ends at any one of amino acids 54-59 of SEQ ID NO: 577. In some embodiments, the RGM-B:hemojuvelin heteromultimer comprises a polypeptide that is at least 70%, 75%, 80%, 85%, 90%, 91%, 92%, 93%, 94%, 95%, 95%, 96%, 97%, 98%, 99%, or 100% identical to a polypeptide that begins at any one of amino acids of 60-72 of SEQ ID NO: 577 and ends at any one of amino acids 248-287 of SEQ ID NO: 577. In some embodiments, the RGM-B:hemojuvelin heteromultimer comprises a hemojuvelin protein, wherein the hemojuvelin protein is a dimer comprising a first polypeptide that is at least 70%, 75%, 80%, 85%, 90%, 91%, 92%, 93%, 94%, 95%, 96%, 97%, 98%, 99%, or 100% identical to a polypeptide that begins at any one of amino acids of 1-6 of SEQ ID NO: 577 and ends at any one of amino acids 54-59 of SEQ ID NO: 577, and second polypeptide that is at least 70%, 75%, 80%, 85%, 90%, 91%, 92%, 93%, 94%, 95%, 96%, 97%, 98%, 99%, or 100% identical to a polypeptide that begins at any one of amino acids of 60-72 of SEQ ID NO: 577 and ends at any one of amino acids 248-287 of SEQ ID NO: 577. In some embodiments, the RGM-B:hemojuvelin heteromultimer comprises a single chain ligand trap that comprises a first hemojuvelin polypeptide domain that is at least 70%, 75%, 80%, 85%, 90%, 91%, 92%, 93%, 94%, 95%, 96%, 97%, 98%, 99%, or 100% identical to a polypeptide that begins at any one of amino acids of 1-6 of SEQ ID NO: 577 and ends at any one of amino acids 54-59 of SEQ ID NO: 577, and second hemojuvelin polypeptide domain that is at least 70%, 75%, 80%, 85%, 90%, 91%, 92%, 93%, 94%, 95%, 96%, 97%, 98%, 99%, or 100% identical to a polypeptide that begins at any one of amino acids of 60-72 of SEQ ID NO: 577, and ends at any one of amino acids 248-287 of SEQ ID NO: 577. In some embodiments, the RGM-B:hemojuvelin heteromultimer comprises a polypeptide that is at least 70%, 75%, 80%, 85%, 90%, 91%, 92%, 93%, 94%, 95%, 95%, 96%, 97%, 98%, 99%, or 100% identical to a polypeptide that begins at any one of amino acids of 1-4 of SEQ ID NO: 581 and ends at any one of amino acids 135-200 of SEQ ID NO: 581. In certain preferred embodiments, RGM-B:hemojuvelin heteromultimers are soluble. In some embodiments, a RGM-B:hemojuvelin heteromultimer of the disclosure binds to one or more TGF-beta superfamily ligands (e.g., binds to one or more TGF-beta superfamily ligands with a K_{D} of at least 1×10⁻⁷). In some embodiments, a RGM-B:hemojuvelin heteromultimer of the disclosure inhibits one or more TGF-beta superfamily ligands (e.g., inhibits Smad signaling). Heteromultimer-ligand binding and inhibition may be determined using a variety of assays including, for example, those described herein (e.g., in vitro binding and/or cell-based signaling assays). In some embodiments, a RGM-B:hemojuvelin heteromultimer of the disclosure has a different TGF-beta ligand binding and/or inhibition profile (specificity) compared to a corresponding homomultimer (e.g., RGM-B and hemojuvelin homomultimers). In some embodiments, a RGM-B:hemojuvelin heteromultimer of the disclosure is a heterodimer.

[0218] In certain aspects, a TGF-beta superfamily type I receptor polypeptide, TGF-beta superfamily type II receptor polypeptide, and/or TGF-beta superfamily co-receptor polypeptide of the disclosure is a fusion protein further comprising polypeptide domain that is heterologous (a heterologous polypeptide domain) to the TGF-beta superfamily type I receptor polypeptide domain, TGF-beta superfamily type II receptor polypeptide domain, and/or TGF-beta superfamily co-receptor polypeptide domain. In some embodiments, a TGF-beta superfamily type I receptor polypeptide is a fusion protein further comprising a heterologous polypeptide domain that is a first or second member of an interaction pair. In some embodiments, a TGF-beta superfamily type II receptor polypeptide is a fusion protein further comprising a heterologous polypeptide domain that is a first or second member of an interaction pair. In some embodiments, a TGF-beta superfamily co-receptor polypeptide is a fusion protein further comprising a heterologous polypeptide domain that is a first or second member of an interaction pair. In certain embodiments, heteromultimers described herein comprise a first polypeptide covalently or non-covalently associated with a second polypeptide wherein the first polypeptide comprises the amino acid sequence of a TGF-beta superfamily type I receptor polypeptide and the amino acid sequence of a first member of an interaction pair (or a second member of an interaction pair) and the second polypeptide comprises the amino acid sequence of a TGF-beta superfamily co-receptor polypeptide and the amino acid sequence of a second member of the interaction pair (or a first member of the interaction pair). In certain embodiments, heteromultimers described herein comprise a first polypeptide covalently or non-covalently associated with a second polypeptide wherein the first polypeptide comprises the amino acid sequence of a TGF-beta superfamily type II receptor polypeptide and the amino acid sequence of a first member of an interaction pair (or a second member of an interaction pair) and the second polypeptide comprises the amino acid sequence of a TGF-beta superfamily co-receptor polypeptide and the amino acid sequence of a second member of the interaction pair (or a first member of the interaction pair). In certain embodiments, heteromultimers described herein comprise a first polypeptide covalently or non-covalently associated with a second polypeptide wherein the first polypeptide comprises the amino acid sequence of a first TGF-beta superfamily co-receptor polypeptide and the amino acid sequence of a first member of an interaction pair (or a second member of an interaction pair) and the second polypeptide comprises the amino acid sequence of a second TGF-beta superfamily co-receptor polypeptide and the amino acid sequence of a second member of the interaction pair (or a first member of the interaction pair). Optionally, the TGF-beta superfamily type I receptor polypeptide is connected directly to the first member of the interaction pair, or an intervening sequence, such as a linker, may be positioned between the amino acid sequence of the TGF-beta superfamily type I receptor polypeptide and the amino acid sequence of the first member of the interaction pair. Similarly, the TGF-beta superfamily type II receptor polypeptide may be connected directly to the second member of the interaction pair, or an intervening sequence, such as a linker, may be positioned between the amino acid sequence of the TGF-beta superfamily type II receptor polypeptide and the amino acid sequence of the second member of the interaction pair. Similarly, the TGF-beta superfamily co-receptor polypeptide may be connected directly to the second member of the interaction pair, or an intervening sequence, such as a linker, may be positioned between the amino acid sequence of the TGF-beta superfamily co-receptor polypeptide and the amino acid sequence of the second member of the interaction pair. Examples of linkers include, but are not limited to, the sequences TGGG (SEQ ID NO: 62), TGGGG (SEQ ID NO: 60), SGGGG (SEQ ID NO: 61), GGGG (SEQ ID NO: 59) SGGG (SEQ ID NO: 63), and GGG (SEQ ID NO: 58).

[0219] Interaction pairs described herein are designed to promote dimerization or form higher order multimers. In some embodiments, the interaction pair may be any two polypeptide sequences that interact to form a complex, particularly a heterodimeric complex although operative embodiments may also employ an interaction pair that forms a homodimeric sequence. The first and second members of the interaction pair may be an asymmetric pair, meaning that the members of the pair preferentially associate with each other rather than self-associate. Accordingly, first and second members of an asymmetric interaction pair may associate to form a heterodimeric complex. Alternatively, the interaction pair may be unguided, meaning that the members of the pair may associate with each other or self-associate without substantial preference and thus may have the same or different amino acid sequences. Accordingly, first and second members of an unguided interaction pair may associate to form a homodimer complex or a heterodimeric complex. Optionally, the first member of the interaction action pair (e.g., an asymmetric pair or an unguided interaction pair) associates covalently with the second member of the interaction pair. Optionally, the first member of the interaction action pair (e.g., an asymmetric pair or an unguided interaction pair) associates non-covalently with the second member of the interaction pair. Optionally, the first member of the interaction pair (e.g., an asymmetrical or an unguided interaction pair) associates through both covalent and non-covalent mechanisms with the second member of the interaction pair.

[0220] In certain aspects, a TGF-beta superfamily type I receptor polypeptide, TGF-beta superfamily type II receptor polypeptide, and/or TGF-beta superfamily co-receptor polypeptide is a fusion protein that comprises constant region from an IgG heavy chain. In some embodiments, the constant region from an IgG heavy chain is an immunoglobulin Fc domain. Traditional Fc fusion proteins and antibodies are examples of unguided interaction pairs, whereas a variety of engineered Fc domains have been designed as asymmetric interaction pairs [Spiess et al (2015) Molecular Immunology 67(2A): 95-106]. Therefore, a first member and/or a second member of an interaction pair described herein may comprise a constant domain of an immunoglobulin, including, for example, the Fc portion of an immunoglobulin. For example, a first member of an interaction pair may comprise an amino acid sequence that is derived from an Fc domain of an IgG (IgG1, IgG2, IgG3, or IgG4), IgA (IgA1 or IgA2), IgE, or IgM immunoglobulin. For example, the first member of an interaction pair may comprise, consist essentially of, or consist of an amino acid sequence that is at least 80%, 85%, 90%, 91%, 92%, 93%, 94%, 95%, 96%, 97%, 98%, 99% or 100% identical to any one of SEQ ID NOs: 200-217. Optionally, a second member of an interaction pair may comprise an amino acid sequence that is derived from an Fc domain of an IgG (IgG1, IgG2, IgG3, or IgG4), IgA (IgA1 or IgA2), IgE, or IgM. Such immunoglobulin domains may comprise one or more amino acid modifications (e.g., deletions, additions, and/or substitutions) that promote heterodimer formation. For example, the second member of an interaction pair may comprise, consist essentially of, or consist of an amino acid sequence that is at least 80%, 85%, 90%, 91%, 92%, 93%, 94%, 95%, 96%, 97%, 98%, 99% or 100% identical to any one of SEQ ID NOs: 200-217. In some embodiments, a first member and a second member of an interaction pair comprise Fc domains derived from the same immunoglobulin class and subtype. In other embodiments, a first member and a second member of an interaction pair comprise Fc domains derived from different immunoglobulin classes or subtypes. Similarly, a first member and/or a second member of an interaction pair (e.g., an asymmetric pair or an unguided interaction pair) comprise a modified constant domain of an immunoglobulin, including, for example, a modified Fc portion of an immunoglobulin. For example, protein complexes of the disclosure may comprise a first modified Fc portion of an immunoglobulin comprising an amino acid sequence that is at least 80%, 85%, 90%, 91%, 92%, 93%, 94%, 95%, 96%, 97%, 98%, or 99% identical to an amino acid sequence selected from the group: SEQ ID NOs: 200-217 and a second modified Fc portion of an immunoglobulin, which may be the same or different from the amino acid sequence of the first modified Fc portion of the immunoglobulin, comprising an amino acid sequence that is at least 80%, 85%, 90%, 91%, 92%, 93%, 94%, 95%, 96%, 97%, 98%, or 99% identical to an amino acid sequence selected from the group: SEQ ID NOs: 200-217. Such immunoglobulin domains may comprise one or more amino acid modifications (e.g., deletions, additions, and/or substitutions) that promote heteromultimer formation. Such immunoglobulin domains may comprise one or more amino acid modifications (e.g., deletions, additions, and/or substitutions) that inhibit homomultimer formation. In some embodiments, a heteromultimer of the disclosure comprises a TGF-beta superfamily type I receptor polypeptide that is a fusion protein further comprising a heterologous polypeptide domain, and wherein the heterologous polypeptide domain comprises an amino acid sequence that is 70%, 75%, 80%, 85%, 90%, 91%, 92%, 93%, 94%, 95%, 96%, 97%, 98%, 99%, or 100% identical to the amino acid sequence of any one of SEQ ID Nos: 200, 202, 204, 206, 213, 215, or 217, and TGF-beta superfamily co-receptor polypeptide that is a fusion protein further comprising a heterologous polypeptide domain, and wherein the heterologous polypeptide domain comprises an amino acid sequence that is 70%, 75%, 80%, 85%, 90%, 91%, 92%, 93%, 94%, 95%, 96%, 97%, 98%, 99%, or 100% identical to the amino acid sequence of any one of SEQ ID Nos: 201, 203, 205, 207, 214, or 216. In some embodiments, heteromultimer of the disclosure comprise TGF-beta superfamily co-receptor polypeptide that is a fusion protein further comprising a heterologous polypeptide domain, and wherein the heterologous polypeptide domain comprises an amino acid sequence that is 70%, 75%, 80%, 85%, 90%, 91%, 92%, 93%, 94%, 95%, 96%, 97%, 98%, 99%, or 100% identical to the amino acid sequence of any one of SEQ ID Nos: 200, 202, 204, 206, 213, 215 or 217; and TGF-beta superfamily type I receptor polypeptide that is a fusion protein further comprising a heterologous polypeptide domain, and wherein the heterologous polypeptide domain comprises an amino acid sequence that is 70%, 75%, 80%, 85%, 90%, 91%, 92%, 93%, 94%, 95%, 96%, 97%, 98%, 99%, or 100% identical to the amino acid sequence of any one of SEQ ID Nos: 201, 203, 205, 207, 214, or 216. In some embodiments, a heteromultimer of the disclosure comprises a TGF-beta superfamily type II receptor polypeptide that is a fusion protein further comprising a heterologous polypeptide domain, and wherein the heterologous polypeptide domain comprises an amino acid sequence that is 70%, 75%, 80%, 85%, 90%, 91%, 92%, 93%, 94%, 95%, 96%, 97%, 98%, 99%, or 100% identical to the amino acid sequence of any one of SEQ ID Nos: 200, 202, 204, 206, 213, 215, or 217; and a TGF-beta superfamily co-receptor polypeptide that is a fusion protein further comprising a heterologous polypeptide domain, and wherein the heterologous polypeptide domain comprises an amino acid sequence that is 70%, 75%, 80%, 85%, 90%, 91%, 92%, 93%, 94%, 95%, 96%, 97%, 98%, 99%, or 100% identical to the amino acid sequence of any one of SEQ ID Nos: 201, 203, 205, 207, 214 and 216. In some embodiments, a heteromultimer of the disclosure comprises a TGF-beta superfamily co-receptor polypeptide that is a fusion protein further comprising a heterologous polypeptide domain, and wherein the heterologous polypeptide domain comprises an amino acid sequence that is 70%, 75%, 80%, 85%, 90%, 91%, 92%, 93%, 94%, 95%, 96%, 97%, 98%, 99%, or 100% identical to the amino acid sequence of any one of SEQ ID Nos: 200, 202, 204, 206, 213, 215, or 217; and a TGF-beta superfamily type II receptor polypeptide that is a fusion protein further comprising a heterologous polypeptide domain, and wherein the heterologous polypeptide domain comprises an amino acid sequence that is 70%, 75%, 80%, 85%, 90%, 91%, 92%, 93%, 94%, 95%, 96%, 97%, 98%, 99%, or 100% identical to the amino acid sequence of any one of SEQ ID Nos: 201, 203, 205, 207, 214, or 216. In some embodiments, a heteromultimer of the disclosure comprises a first TGF-beta superfamily co-receptor polypeptide that is a fusion protein further comprising a heterologous polypeptide domain, and wherein the heterologous polypeptide domain comprises an amino acid sequence that is 70%, 75%, 80%, 85%, 90%, 91%, 92%, 93%, 94%, 95%, 96%, 97%, 98%, 99%, or 100% identical to the amino acid sequence of any one of SEQ ID Nos: 200, 202, 204, 206, 213, 215, or 217; and a second TGF-beta superfamily co-receptor polypeptide that is a fusion protein further comprising a heterologous polypeptide domain, and wherein the heterologous polypeptide domain comprises an amino acid sequence that is 70%, 75%, 80%, 85%, 90%, 91%, 92%, 93%, 94%, 95%, 96%, 97%, 98%, 99%, or 100% identical to the amino acid sequence of any one of SEQ ID Nos: 201, 203, 205, 207, 214, or 216. In some embodiments, a heteromultimer of the disclosure comprises a second TGF-beta superfamily co-receptor polypeptide that is a fusion protein further comprising a heterologous polypeptide domain, and wherein the heterologous polypeptide domain comprises an amino acid sequence that is 70%, 75%, 80%, 85%, 90%, 91%, 92%, 93%, 94%, 95%, 96%, 97%, 98%, 99%, or 100% identical to the amino acid sequence of any one of SEQ ID Nos: 200, 202, 204, 206, 213, 215, or 217; and a first TGF-beta superfamily co-receptor polypeptide that is a fusion protein further comprising a heterologous polypeptide domain, and wherein the heterologous polypeptide domain comprises an amino acid sequence that is 70%, 75%, 80%, 85%, 90%, 91%, 92%, 93%, 94%, 95%, 96%, 97%, 98%, 99%, or 100% identical to the amino acid sequence of any one of SEQ ID Nos: 201, 203, 205, 207, 214 and 216.

[0221] In certain aspects, a TGF-beta superfamily type I receptor polypeptide, TGF-beta superfamily type II receptor polypeptide, and/or TGF-beta superfamily co-receptor polypeptide disclosed herein comprise one or more modified amino acid residues selected from: a glycosylated amino acid, a PEGylated amino acid, a farnesylated amino acid, an acetylated amino acid, a biotinylated amino acid, an amino acid conjugated to a lipid moiety, and an amino acid conjugated to an organic derivatizing agent. In some embodiments, a TGF-beta superfamily type I receptor polypeptide, TGF-beta superfamily type II receptor polypeptide, and/or TGF-beta superfamily co-receptor polypeptide is glycosylated and has a glycosylation pattern obtainable from the expression of the polypeptides in a mammalian cell, including, for example, a CHO cell.

[0222] In certain aspects, the disclosure provides nucleic acids (e.g., isolated nucleic acids and/or recombinant nucleic acids) encoding any of the TGF-beta superfamily type I receptor polypeptides, TGF-beta superfamily type II receptor polypeptides, and/or TGF-beta superfamily co-receptor polypeptides described herein. In some embodiments, one or more of the nucleic acids disclosed herein may be operably linked to a promoter for expression. In some embodiments, the disclosure provides vectors that comprise one or more of the nucleic acids disclosed herein. In some embodiments, the disclosure provides cells that comprise one or more of the nucleic acids or vectors disclosed herein. Preferably the cell is a mammalian cell such as a COS cell or a CHO cell.

[0223] In certain aspects, the disclosure provides methods for making one or more of the TGF-beta superfamily type I receptor polypeptides, TGF-beta superfamily type II receptor polypeptides, and/or TGF-beta superfamily co-receptor polypeptides described herein as well as heteromultimers comprising such polypeptides. Such methods may include expressing any of the nucleic acids disclosed herein in a suitable cell (e.g., CHO cell or a COS cell). In some embodiments, the disclosure relates to a method of making a heteromultimer comprising a TGF-beta type I receptor polypeptide and a TGF-beta co-receptor polypeptide by culturing a cell under conditions suitable for expression of a TGF-beta type I receptor polypeptide and a TGF-beta co-receptor polypeptide, wherein the cell comprises a first nucleic acid comprising a coding sequence for a TGF-beta type I receptor polypeptide, such as those described herein, and a second nucleic acid comprising a coding sequence for a TGF-beta co-receptor, such as those described herein. In some embodiments, the disclosure relates to a method of making a heteromultimer comprising a TGF-beta type II receptor polypeptide and a TGF-beta co-receptor polypeptide by culturing a cell under conditions suitable for expression of a TGF-beta type II receptor polypeptide and a TGF-beta co-receptor polypeptide, wherein the cell comprises a first nucleic acid comprising a coding sequence for a TGF-beta type II receptor, such as those described herein, and a second nucleic acid comprising a coding sequence for the TGF-beta co-receptor, such as those described herein. In some embodiments, the disclosure relates to a method of making a heteromultimer comprising a first TGF-beta co-receptor polypeptide and a second TGF-beta co-receptor polypeptide by culturing a cell under conditions suitable for expression of a first TGF-beta co-receptor polypeptide and a second TGF-beta co-receptor polypeptide, wherein the cell comprises a first nucleic acid comprising a coding sequence for the TGF-beta co-receptor, such as those described herein and a second nucleic acid comprising a coding sequence for the TGF-beta co-receptor, such as those described herein. In some embodiments, the disclosure relates to a method of making a heteromultimer comprising a TGF-beta type I receptor polypeptide and a TGF-beta co-receptor polypeptide comprising: a) culturing a first cell under conditions suitable for expression of a TGF-beta type I receptor polypeptide, wherein the cell comprises a nucleic acid comprising a coding sequence for a TGF-beta type I receptor polypeptide; b) recovering the TGF-beta type I receptor polypeptide; c) culturing a second cell under conditions suitable for expression of a TGF-beta co-receptor polypeptide, wherein the cell comprises a nucleic acid comprising a coding sequence for a TGF-beta co-receptor polypeptide; d) recovering the TGF-beta co-receptor polypeptide; e) combining the recovered TGF-beta type I receptor polypeptide and the TGF-beta co-receptor polypeptide under conditions suitable for heteromultimer formation. In some embodiments, the disclosure relates to a method of making a heteromultimer comprising a TGF-beta type II receptor polypeptide and a TGF-beta co-receptor polypeptide comprising: a) culturing a first cell under conditions suitable for expression of a TGF-beta type II receptor polypeptide, wherein the cell comprises a nucleic acid comprising a coding sequence for a TGF-beta type II receptor polypeptide; b) recovering the TGF-beta type II receptor polypeptide; c) culturing a second cell under conditions suitable for expression of a TGF-beta co-receptor polypeptide, wherein the cell comprises a nucleic acid comprising a coding sequence for a TGF-beta co-receptor polypeptide; d) recovering the TGF-beta co-receptor polypeptide; e) combining the recovered TGF-beta type II receptor polypeptide and the TGF-beta co-receptor polypeptide under conditions suitable for heteromultimer formation. In some embodiments, the disclosure relates to a method of making a heteromultimer comprising a first TGF-beta co-receptor polypeptide and a second TGF-beta co-receptor polypeptide comprising: a) culturing a first cell under conditions suitable for expression of a first TGF-beta co-receptor polypeptide, wherein the cell comprises a nucleic acid comprising a coding sequence for a first TGF-beta co-receptor polypeptide; b) recovering the first TGF-beta co-receptor polypeptide; c) culturing a second cell under conditions suitable for expression of a second TGF-beta co-receptor polypeptide, wherein the cell comprises a nucleic acid comprising a coding sequence for a second TGF-beta co-receptor polypeptide; d) recovering the second TGF-beta co-receptor polypeptide; e) combining the recovered first TGF-beta co-receptor polypeptide and the second TGF-beta co-receptor polypeptide under conditions suitable for heteromultimer formation. Optionally, methods of making a heteromultimer as described herein may comprise a further step of recovering the heteromultimer. Heteromultimers disclosed herein may be crude, partially purified, or highly purified fractions using any of the well-known techniques for obtaining protein from cell cultures.

[0224] Any of the heteromultimers described herein may be incorporated into a pharmaceutical preparation. Optionally, such pharmaceutical preparations are at least 80%, 85%, 90%, 95%, 97%, 98% or 99% pure with respect to other polypeptide components. Optionally, pharmaceutical preparations disclosed herein may comprise one or more additional active agents. In some embodiments, heteromultimers of the disclosure comprise less than 10%, 9%, 8%, 7%, 5%, 4%, 3%, 2%, or less than 1% type I receptor polypeptide homomultimers. In some embodiments, heteromultimers of the disclosure comprise less than 10%, 9%, 8%, 7%, 5%, 4%, 3%, 2%, or less than 1% type II receptor polypeptide homomultimers. In some embodiments, heteromultimers of the disclosure comprise less than 10%, 9%, 8%, 7%, 5%, 4%, 3%, 2%, or less than 1% co-receptor polypeptide homomultimers.

[0225] The disclosure further relates to methods and heteromultimeric for use in the treatment or prevention of various disease and disorders associated with, for example, bone and red blood cells that are affected by one or more ligands of the TGF-beta superfamily. Such disease and disorders include, but are not limited to, anemia, a hemoglobinopathy, MDS, sickle-cell disease, thalassemia, and a bone-related disorder (e.g., bone-related disorders associated with low bone strength, low bone mineral density, and/or low bone growth including). In some embodiments, the disclosure relates to methods and heteromultimers for use in increasing red blood cell and/or hemoglobin levels in a patient in need thereof. In some embodiments, the disclosure relates to methods and heteromultimeric for use in increasing bone strength, bone mineral density, and/or bone growth in a patient in need thereof. In some embodiments, the disclosure relates to methods and heteromultimers for treating, preventing, and/or delaying the progression or onset of one or more complications of any one of MDS, sickle-cell disease, a thalassemia, and a hemoglobinopathy in a patient in need thereof.

### BRIEF DESCRIPTION OF THE DRAWINGS

[0226] This patent or patent application filed contains at least one drawing executed in color. Copies of this patent or patent application publication with color drawing(s) will be provided by the office upon request and payment of the necessary fee.

[0227] FIGS. 1A and 1B show two schematic examples of heteromultimer proteins comprising a TGF-beta superfamily co-receptor polypeptide and a TGF-beta superfamily type I receptor or type II receptor polypeptide. FIG. 1A depicts a heteromultimer comprising one TGF-beta superfamily co-receptor fusion polypeptide and one TGF-beta superfamily type I receptor or type II receptor fusion polypeptide, which can be assembled covalently or noncovalently via a multimerization domain contained within each polypeptide chain. Two assembled multimerization domains constitute an interaction pair, which can be either guided or unguided. FIG. 1B depicts a heteromultimer comprising two heterodimeric complexes as in FIG. 1A. Complexes of higher order can be envisioned.

[0228] FIG. 2 shows a schematic example of a heteromultimer comprising a TGF-beta superfamily co-receptor polypeptide (indicated as “co-receptor”) (e.g. a polypeptide that is at least 80%, 85%, 90%, 95%, 96%, 97%, 98%, 99% or 100% identical to an endoglin, betaglycan, Cripto-1, Cryptic protein, Cryptic family protein IB, Crim1, Crim2, BAMBI, BMPER, RGM-A, RGM-B, or hemojuvelin polypeptide from humans or other species such as those described herein, e.g., SEQ ID Nos: 501, 502, 505, 506, 509, 510, 513, 514, 517, 518, 521, 522, 525, 526, 529, 530, 533, 534, 537, 538, 541, 542, 545, 546, 549, 550, 553, 554, 557, 558, 561, 562, 565, 566, 569, 570, 573, 574, 577, 578, 581, 582, 585, 586, 589, 590, 593, or 594) and a type I receptor polypeptide (e.g. a polypeptide that is at least 80%, 85%, 90%, 95%, 96%, 97%, 98%, 99% or 100% identical to an ALK1, ALK2, ALK3, ALK4, ALK5, ALK6 or ALK7 polypeptide from humans or other species such as those described herein, e.g., SEQ ID Nos: 14, 15, 18, 19, 22, 23, 26, 27, 30, 31, 34, 35, 38, 39, 83, 84, 87, 88, 91, 92, 301, 302, 305, 306, 309, 310, and 313) or a TGF-beta superfamily type II receptor polypeptide (e.g. a polypeptide that is at least 80%, 85%, 90%, 95%, 96%, 97%, 98%, 99% or 100% identical to an ActRIIA, ActRIIB, MISRII, BMPRII, or TGFBRII polypeptide from humans or other species such as those described herein, e.g., SEQ ID Nos: 1, 2, 3, 4, 5, 6, 9, 10, 11, 42, 43, 46, 47, 50, 51, 67, 68, 71, 72, 75, 76, 79, and 80) (indicated as “I/II”). In the illustrated embodiment, the co-receptor polypeptide is part of a fusion polypeptide that comprises a first member of an interaction pair (“C”), and the type I or II receptor polypeptide is part of a fusion polypeptide that comprises a second member of an interaction pair (“D”). In each fusion polypeptide, a linker may be positioned between the co-, type I, or type II receptor polypeptide and the corresponding member of the interaction pair. The first and second members of the interaction pair (C, D) may be a guided (asymmetric) pair, meaning that the members of the pair associate preferentially with each other rather than self-associate, or the interaction pair may be unguided, meaning that the members of the pair may associate with each other or self-associate without substantial preference and may have the same or different amino acid sequences. Traditional Fc fusion proteins and antibodies are examples of unguided interaction pairs, whereas a variety of engineered Fc domains have been designed as guided (asymmetric) interaction pairs [e.g., Spiess et al (2015) Molecular Immunology 67(2A): 95-106].

[0229] FIG. 3 shows an alignment of extracellular domains of human ActRIIA (SEQ ID NO: 10) and human ActRIIB (SEQ ID NO: 2) with the residues that are deduced herein, based on composite analysis of multiple ActRIIB and ActRIIA crystal structures, to directly contact ligand indicated with boxes.

[0230] FIG. 4 shows a multiple sequence alignment of various vertebrate ActRIIB precursor proteins without their intracellular domains, human ActRIIA precursor protein without its intracellular domain, and a consensus ActRII precursor protein.

[0231] FIG. 5 shows multiple sequence alignment of Fc domains from human IgG isotypes using Clustal 2.1. Hinge regions are indicated by dotted underline. Double underline indicates examples of positions engineered in IgG1 Fc to promote asymmetric chain pairing and the corresponding positions with respect to other isotypes IgG2, IgG3 and IgG4.

[0232] FIGS. 6A-6D show schematic examples of heteromeric protein complexes comprising a TGF-beta superfamily co-receptor polypeptide (indicated as “co-receptor”) (e.g. a polypeptide that is at least 80%, 85%, 90%, 95%, 96%, 97%, 98%, 99% or 100% identical to an endoglin, betaglycan, Cripto-1, Cryptic protein, Cryptic family protein IB, Crim1, Crim2, BAMBI, BMPER, RGM-A, RGM-B, or hemojuvelin polypeptide from humans or other species such as those described herein, e.g., SEQ ID Nos: 501, 502, 505, 506, 509, 510, 513, 514, 517, 518, 521, 522, 525, 526, 529, 530, 533, 534, 537, 538, 541, 542, 545, 546, 549, 550, 553, 554, 557, 558, 561, 562, 565, 566, 569, 570, 573, 574, 577, 578, 581, 582, 585, 586, 589, 590, 593, or 594) and a type I receptor polypeptide (e.g. a polypeptide that is at least 80%, 85%, 90%, 95%, 96%, 97%, 98%, 99% or 100% identical to an ALK1, ALK2, ALK3, ALK4, ALK5, ALK6 or ALK7 polypeptide from humans or other species such as those described herein, e.g., SEQ ID Nos: 14, 15, 18, 19, 22, 23, 26, 27, 30, 31, 34, 35, 38, 39, 83, 84, 87, 88, 91, 92, 301, 302, 305, 306, 309, 310, and 313) or a TGF-beta superfamily type II receptor polypeptide (e.g. a polypeptide that is at least 80%, 85%, 90%, 95%, 96%, 97%, 98%, 99% or 100% identical to an ActRIIA, ActRIIB, MISRII, BMPRII, or TGFBRII polypeptide from humans or other species such as those described herein, e.g., SEQ ID Nos: 1, 2, 3, 4, 5, 6, 9, 10, 11, 42, 43, 46, 47, 50, 51, 67, 68, 71, 72, 75, 76, 79, and 80) (indicated as “I/II”). In the illustrated embodiments, the a co-receptor polypeptide is part of a fusion polypeptide that comprises a first member of an interaction pair (“C₁”), and a type I or type II receptor polypeptide is part of a fusion polypeptide that comprises a second member of an interaction pair (“C₂”). Suitable interaction pairs included, for example, heavy chain and/or light chain immunoglobulin interaction pairs, truncations, and variants thereof such as those described herein [e.g., Spiess et al (2015) Molecular Immunology 67(2A): 95-106]. In each fusion polypeptide, a linker may be positioned between the co-, type I, and/or type II receptor polypeptide receptor polypeptide and the corresponding member of the interaction pair. The first and second members of the interaction pair may be unguided, meaning that the members of the pair may associate with each other or self-associate without substantial preference, and they may have the same or different amino acid sequences. See FIG. 6A. Alternatively, the interaction pair may be a guided (asymmetric) pair, meaning that the members of the pair associate preferentially with each other rather than self-associate. See FIG. 6B. Complexes of higher order can be envisioned. See FIGS. 6C and 6D.

[0233] FIGS. 7A-7G show schematic examples of heteromultimers comprising two TGF-beta superfamily co-receptor polypeptides (indicated as “co-receptor”) (e.g. a polypeptide that is at least 80%, 85%, 90%, 95%, 96%, 97%, 98%, 99% or 100% identical to an endoglin, betaglycan, Cripto-1, Cryptic protein, Cryptic family protein IB, Crim1, Crim2, BAMBI, BMPER, RGM-A, RGM-B, or hemojuvelin polypeptide from humans or other species such as those described herein, e.g., SEQ ID Nos: 501, 502, 505, 506, 509, 510, 513, 514, 517, 518, 521, 522, 525, 526, 529, 530, 533, 534, 537, 538, 541, 542, 545, 546, 549, 550, 553, 554, 557, 558, 561, 562, 565, 566, 569, 570, 573, 574, 577, 578, 581, 582, 585, 586, 589, 590, 593, or 594) and two type I receptor polypeptides (e.g. a polypeptide that is at least 80%, 85%, 90%, 95%, 96%, 97%, 98%, 99% or 100% identical to an ALK1, ALK2, ALK3, ALK4, ALK5, ALK6 or ALK7 polypeptide from humans or other species such as those described herein, e.g., SEQ ID Nos: 14, 15, 18, 19, 22, 23, 26, 27, 30, 31, 34, 35, 38, 39, 83, 84, 87, 88, 91, 92, 301, 302, 305, 306, 309, 310, and 313) or TGF-beta superfamily type II receptor polypeptides (e.g. a polypeptide that is at least 80%, 85%, 90%, 95%, 96%, 97%, 98%, 99% or 100% identical to an ActRIIA, ActRIIB, MISRII, BMPRII, or TGFBRII polypeptide from humans or other species such as those described herein, e.g., SEQ ID Nos: 1, 2, 3, 4, 5, 6, 9, 10, 11, 42, 43, 46, 47, 50, 51, 67, 68, 71, 72, 75, 76, 79, and 80) (indicated as “I/II”). In the illustrated embodiment 7A, the first co-receptor polypeptide (from left to right) is part of a fusion polypeptide that comprises a first member of an interaction pair (“C₁”) and further comprises an additional first member of an interaction pair (“A₁”); and the second co-receptor polypeptide is part of a fusion polypeptide that comprises a second member of an interaction pair (“C₂”) and further comprises an first member of an interaction pair (“A₂”). The first type I or type II receptor polypeptide (from left to right) is part of a fusion polypeptide that comprises a second member of an interaction pair (“B₁”); and the second type I or type II receptor polypeptide is part of a fusion polypeptide that comprises a second member of an interaction pair (“B₂”). A₁ and A₂ may be the same or different; B₁ and B₂ may be the same or different, and C₁ and C₂ may be the same or different. In each fusion polypeptide, a linker may be positioned between the co, type I, and/or type II receptor polypeptides and the corresponding member of the interaction pair as well as between interaction pairs. FIG. 7A is an example of an association of unguided interaction pairs, meaning that the members of the pair may associate with each other or self-associate without substantial preference and may have the same or different amino acid sequences.

[0234] In the illustrated embodiment 7B, the first type I or type II receptor polypeptide (from left to right) is part of a fusion polypeptide that comprises a first member of an interaction pair (“C₁”) and further comprises an additional first member of an interaction pair (“A₁”); and the second type I or type II receptor polypeptide is part of a fusion polypeptide that comprises a second member of an interaction pair (“B₂”). The first co-receptor polypeptide (from left to right) is part of a fusion polypeptide that comprises a second member of an interaction pair (“B₁”); and the second co-receptor polypeptide is part of a fusion polypeptide that comprises a second member of an interaction pair (“C₂”) and further comprises a first member of an interaction pair (“A₂”). In each fusion polypeptide, a linker may be positioned between the co-, type I, and/or type II receptor polypeptide and the corresponding member of the interaction pair as well as between interaction pairs. FIG. 7B is an example of an association of guided (asymmetric) interaction pairs, meaning that the members of the pair associate preferentially with each other rather than self-associate.

[0235] Suitable interaction pairs included, for example, heavy chain and/or light chain immunoglobulin interaction pairs, truncations, and variants thereof as described herein [e.g., Spiess et al (2015) Molecular Immunology 67(2A): 95-106]. Complexes of higher order can be envisioned. See FIG. 7C-7F. Using similar methods, particularly those that employ light and/or heavy chain immunoglobulins, truncations, or variants thereof, interaction pairs may be used to produce heterodimers that resemble antibody Fab and F(ab′)₂ complexes [e.g., Spiess et al (2015) Molecular Immunology 67(2A): 95-106]. See FIG. 7G.

[0236] FIGS. 8A and 8B show schematic examples of a heteromultimers comprising a TGF-beta superfamily co-receptor (indicated as “co-receptor”) (e.g. a polypeptide that is at least 80%, 85%, 90%, 95%, 96%, 97%, 98%, 99% or 100% identical to an endoglin, betaglycan, Cripto-1, Cryptic protein, Cryptic family protein IB, Crim1, Crim2, BAMBI, BMPER, RGM-A, RGM-B, or hemojuvelin polypeptide from humans or other species such as those described herein, e.g., SEQ ID Nos: 501, 502, 505, 506, 509, 510, 513, 514, 517, 518, 521, 522, 525, 526, 529, 530, 533, 534, 537, 538, 541, 542, 545, 546, 549, 550, 553, 554, 557, 558, 561, 562, 565, 566, 569, 570, 573, 574, 577, 578, 581, 582, 585, 586, 589, 590, 593, or 594) and a type I receptor polypeptide (e.g. a polypeptide that is at least 80%, 85%, 90%, 95%, 96%, 97%, 98%, 99% or 100% identical to an ALK1, ALK2, ALK3, ALK4, ALK5, ALK6 or ALK7 polypeptide from humans or other species such as those described herein, e.g., SEQ ID Nos: 14, 15, 18, 19, 22, 23, 26, 27, 30, 31, 34, 35, 38, 39, 83, 84, 87, 88, 91, 92, 301, 302, 305, 306, 309, 310, and 313) or a TGF-beta superfamily type II receptor polypeptide (e.g. a polypeptide that is at least 80%, 85%, 90%, 95%, 96%, 97%, 98%, 99% or 100% identical to an ActRIIA, ActRIIB, MISRII, BMPRII, or TGFBRII polypeptide from humans or other species such as those described herein, e.g., SEQ ID Nos: 1, 2, 3, 4, 5, 6, 9, 10, 11, 42, 43, 46, 47, 50, 51, 67, 68, 71, 72, 75, 76, 79, and 80) (indicated as “I/II”). In the illustrated embodiments, the co-receptor polypeptide is part of a fusion polypeptide that comprises a first member of an interaction pair (“C₁”), and further comprises an additional first member of an interaction pair (“A₁”). The type I or type II receptor polypeptide is part of a fusion polypeptide that comprises a second member of an interaction pair (“B₁”). The variable heavy chain (V_{H}) polypeptide is part of a fusion polypeptide that comprises a second member of an interaction pair (“C₂”), and further comprises a first member of an interaction pair (“A₂”). The variable heavy chain (V_{L}) polypeptide is part of a fusion polypeptide that comprises a second member of an interaction pair (“B₂”). In each fusion polypeptide, a linker may be positioned between the co-, type I, and/or type II receptor polypeptide and the corresponding member of the interaction pair, between interaction pairs, and between the V_{H} and V_{L} polypeptides and a member of the interaction pair. A₁ and A₂ may be the same or different; B₁ and B₂ may be the same or different, and C₁ and C₂ may be the same or different. Suitable interaction pairs included, for example, constant heavy chain and/or light chain immunoglobulin interaction pairs, truncations, and variants thereof as described herein [e.g., Spiess et al (2015) Molecular Immunology 67(2A): 95-106]. FIG. 8A is an example of an association of guided (asymmetric) interaction pairs, meaning that the members of the pair associate preferentially with each other rather than self-associate. FIG. 8B is an example of an association of unguided interaction pairs, meaning that the members of the pair may associate with each other or self-associate without substantial preference and may have the same or different amino acid sequences.

[0237] FIG. 9 shows schematic examples of co-receptor: type I/II receptor single-trap polypeptides. Co-receptor: type I/II receptor single-trap polypeptides may contain multiple co-receptor domains (e.g., 1, 2, 3, 4, 5, 6, 7, 9, 10 or more domains), having the same or different sequences, and type I receptor domains (e.g., 1, 2, 3, 4, 5, 6, 7, 9, 10 or more domains), having the same or different sequences, or multiple type II receptor domains (e.g., 1, 2, 3, 4, 5, 6, 7, 9, 10 or more domains), having the same or different sequences. These co-receptor and type I/II receptor domains may be arranged in any order and may comprise one or more linker domains positions between one or more of the co-, type I, and/or type II receptor domains. Such ligand traps may be useful as therapeutic agents to treat or prevent diseases or disorders described herein.

[0238] FIG. 10A-10D show schematic examples of heteromultimers comprising at least one co-receptor: type I/II receptor single-chain trap polypeptide. In the illustrated embodiments 10A and 10B, a first co-receptor: type I/II receptor single-chain trap polypeptide (from left to right) is part of a fusion polypeptide that comprises a first member of an interaction pair (“C₁”); and a second co-receptor: type I/II receptor single-chain trap polypeptide is part of a fusion polypeptide that comprises a second member of an interaction pair (“C₂”). C₁ and C₂ may be the same or different. The first and second co-receptor: type I/II receptor single-chain trap polypeptides may be the same or different. In each fusion polypeptide, a linker may be positioned between the co-receptor: type I/II receptor single-chain trap polypeptide and the corresponding member of the interaction pair. Suitable interaction pairs included, for example, heavy chain and/or light chain immunoglobulin interaction pairs, truncations, and variants thereof as described herein [e.g., Spiess et al (2015) Molecular Immunology 67(2A): 95-106]. FIG. 10A is an example of an association of unguided interaction pairs, meaning that the members of the pair may associate with each other or self-associate without substantial preference and may have the same or different amino acid sequences. FIG. 10B is an example of an association of guided (asymmetric) interaction pairs, meaning that the members of the pair associate preferentially with each other rather than self-associate. Complexes of higher order can be envisioned. In addition, such co-receptor: type I/II receptor single-chain trap polypeptides may be similarly be associated, covalently or non-covalently, with one or more co-receptor, type I receptor polypeptides, and/or one or more type II receptor polypeptides. See FIG. 10C. Also, such co-receptor: type I/II receptor single-chain trap polypeptides may be similarly be associated, covalently or non-covalently, with one or more ligand-binding domain of an antibody (e.g., a ligand binding domain of an antibody that binds to one or more type I receptor: type II receptor heteromultimer binding-ligands). See FIG. 10D.

[0239] FIGS. 11A and 11B indicates exemplary polypeptides for TGFβ superfamily co-receptors, along with their amino acid (AA) and nucleotide (NT) sequence identification numbers in the present application, corresponding to individual co-receptor isoforms identified by NCBI Reference Sequence number.

### DETAILED DESCRIPTION OF THE INVENTION

### 1. Overview

[0240] In part, the disclosure provides recombinant TGF-beta superfamily heteromultimers (heteromultimers) comprising at least one TGF-beta superfamily co-receptor polypeptide (e.g., endoglin, betaglycan, Cripto-1, Cryptic, Cryptic family protein 1B, Crim1, Crim2, BAMBI, BMPER, RGM-A, RGM-B, hemojuvelin, and MuSK), including fragments and variants thereof. In some embodiments, the disclosure relates to a recombinant heteromultimer comprising a TGF-beta superfamily co-receptor polypeptide selected from the group consisting of: endoglin, betaglycan, Cripto-1, Cryptic, Cryptic family protein 1B, Crim1, Crim2, BAMBI, BMPER, RGM-A, RGM-B, hemojuvelin, and MuSK, including fragments and variants thereof, and a TGF-beta superfamily type I receptor polypeptide selected from the group consisting of: ALK1, ALK2, ALK3, ALK4, ALK5, ALK6, and ALK7, including fragments and variants thereof. In some embodiments, the disclosure relates to a recombinant heteromultimer comprising a TGF-beta superfamily co-receptor polypeptide selected from the group consisting of: endoglin, betaglycan, Cripto-1, Cryptic, Cryptic family protein 1B, Crim1, Crim2, BAMBI, BMPER, RGM-A, RGM-B, hemojuvelin, and MuSK, including fragments and variants thereof, and a TGF-beta superfamily type II receptor polypeptide selected from the group consisting of: ActRIIA, ActRIIB, TGFBRII, BMPRII, and MISRII, including fragments and variants thereof. In some embodiments, the disclosure relates to a recombinant heteromultimer comprising a first TGF-beta superfamily co-receptor polypeptide selected from the group consisting of: endoglin, betaglycan, Cripto-1, Cryptic, Cryptic family protein 1B, Crim1, Crim2, BAMBI, BMPER, RGM-A, RGM-B, hemojuvelin, and MuSK, including fragments and variants thereof, and a second TGF-beta superfamily co-receptor polypeptide selected from the group consisting of: endoglin, betaglycan, Cripto-1, Cryptic, Cryptic family protein 1B, Crim1, Crim2, BAMBI, BMPER, RGM-A, RGM-B, hemojuvelin, and MuSK, including fragments and variants thereof.

[0241] The TGF-β superfamily is comprised of over 30 secreted factors including TGF-betas, activins, nodals, bone morphogenetic proteins (BMPs), growth and differentiation factors (GDFs), and anti-Mullerian hormone (AMH). See, e.g., Weiss et al. (2013) Developmental Biology, 2(1): 47-63. Members of the superfamily, which are found in both vertebrates and invertebrates, are ubiquitously expressed in diverse tissues and function during the earliest stages of development throughout the lifetime of an animal. Indeed, TGF-β superfamily proteins are key mediators of stem cell self-renewal, gastrulation, differentiation, organ morphogenesis, and adult tissue homeostasis. Consistent with this ubiquitous activity, aberrant TGF-beta superfamily signaling is associated with a wide range of human pathologies.

[0242] Ligands of the TGF-beta superfamily share the same dimeric structure in which the central 3-1/2 turn helix of one monomer packs against the concave surface formed by the beta-strands of the other monomer. The majority of TGF-beta family members are further stabilized by an intermolecular disulfide bonds. This disulfide bond traverses through a ring formed by two other disulfide bonds generating what has been termed a ‘cysteine knot’ motif. See, e.g., Lin et al., (2006) Reproduction 132: 179-190 and Hinck et al. (2012) FEBS Letters 586: 1860-1870.

[0243] TGF-beta superfamily signaling is mediated by heteromeric complexes of type I and type II serine/threonine kinase receptors, which phosphorylate and activate downstream SMAD proteins (e.g., SMAD proteins 1, 2, 3, 5, and 8) upon ligand stimulation. See, e.g., Massague (2000) Nat. Rev. Mol. Cell Biol. 1:169-178. These type I and type II receptors are transmembrane proteins, composed of a ligand-binding extracellular domain with cysteine-rich region, a transmembrane domain, and a cytoplasmic domain with predicted serine/threonine kinase specificity. In general, type I receptors mediate intracellular signaling while the type II receptors are required for binding TGF-beta superfamily ligands. Type I and II receptors form a stable complex after ligand binding, resulting in phosphorylation of type I receptors by type II receptors.

[0244] The TGF-beta family can be divided into two phylogenetic branches based on the type I receptors they bind and the Smad proteins they activate. One is the more recently evolved branch, which includes, e.g., the TGF-betas, activins, GDF8, GDF9, GDF11, BMP3 and nodal, which signal through type I receptors that activate Smads 2 and 3 [Hinck (2012) FEBS Letters 586:1860-1870]. The other branch comprises the more distantly related proteins of the superfamily and includes, e.g., BMP2, BMP4, BMP5, BMP6, BMP7, BMP8a, BMP8b, BMP9, BMP10, GDF1, GDF5, GDF6, and GDF7, which signal through Smads 1, 5, and 8.

[0245] TGF-beta isoforms are the founding members of the TGF-beta superfamily, of which there are 3 known isoforms in mammals designated as TGF-beta1, TGF-beta2 and TGF-beta3. Mature bioactive TGF-beta ligands function as homodimers and predominantly signal through the type I receptor ALK5, but have also been found to additionally signal through ALK1 in endothelial cells. See, e.g., Goumans et al. (2003) Mol Cell 12(4): 817-828. TGF-beta1 is the most abundant and ubiquitously expressed isoform. TGF-beta1 is known to have an important role in wound healing, and mice expressing a constitutively active TGF-beta1 transgene develop fibrosis. See e.g., Clouthier et al., (1997) J Clin. Invest. 100(11): 2697-2713. TGF-beta1 is also involved in T cell activation and maintenance of T regulatory cells. See, e.g., Li et al., (2006) Immunity 25(3): 455-471. TGF-beta2 expression was first described in human glioblastoma cells, and is occurs in neurons and astroglial cells of the embryonic nervous system. TGF-beta2 is known to suppress interleukin-2-dependent growth of T lymphocytes. TGF-beta3 was initially isolated from a human rhabdomyosarcoma cell line and since has been found in carcinoma cell lines. TGF-beta3 is known to be important for palate and lung morphogenesis. See, e.g., Kubiczkova et al., (2012) Journal of Translational Medicine 10:183.

[0246] Activins are members of the TGF-beta superfamily and were initially discovered as regulators of secretion of follicle-stimulating hormone, but subsequently various reproductive and non-reproductive roles have been characterized. There are three principal activin forms (A, B, and AB) that are homo/heterodimers of two closely related β subunits (β_{A}β_{A}, β_{B}β_{B}, and β_{A}β_{B}, respectively). The human genome also encodes an activin C and an activin E, which are primarily expressed in the liver, and heterodimeric forms containing β_{C} or β_{E} are also known. In the TGF-beta superfamily, activins are unique and multifunctional factors that can stimulate hormone production in ovarian and placental cells, support neuronal cell survival, influence cell-cycle progress positively or negatively depending on cell type, and induce mesodermal differentiation at least in amphibian embryos. See, e.g., DePaolo et al. (1991) Proc Soc Ep Biol Med. 198:500-512; Dyson et al. (1997) Curr Biol. 7:81-84; and Woodruff (1998) Biochem Pharmacol. 55:953-963. In several tissues, activin signaling is antagonized by its related heterodimer, inhibin. For example, in the regulation of follicle-stimulating hormone (FSH) secretion from the pituitary, activin promotes FSH synthesis and secretion, while inhibin reduces FSH synthesis and secretion. Other proteins that may regulate activin bioactivity and/or bind to activin include follistatin (FS), follistatin-related protein (FSRP, also known as FLRG or FSTL3), and α₂-macroglobulin.

[0247] As described herein, agents that bind to “activin A” are agents that specifically bind to the β_{A} subunit, whether in the context of an isolated β_{A} subunit or as a dimeric complex (e.g., a β_{A}β_{A} homodimer or a β_{A}β_{B} heterodimer). In the case of a heterodimer complex (e.g., a β_{A}β_{B} heterodimer), agents that bind to “activin A” are specific for epitopes present within the β_{A} subunit, but do not bind to epitopes present within the non-β_{A} subunit of the complex (e.g., the 13B subunit of the complex). Similarly, agents disclosed herein that antagonize (inhibit) “activin A” are agents that inhibit one or more activities as mediated by a β_{A} subunit, whether in the context of an isolated β_{A} subunit or as a dimeric complex (e.g., a β_{A}β_{A} homodimer or a β_{A}β_{B} heterodimer). In the case of β_{A}β_{B} heterodimers, agents that inhibit “activin A” are agents that specifically inhibit one or more activities of the β_{A} subunit, but do not inhibit the activity of the non-β_{A} subunit of the complex (e.g., the β_{B} subunit of the complex). This principle applies also to agents that bind to and/or inhibit “activin B”, “activin C”, and “activin E”. Agents disclosed herein that antagonize “activin AB”, “activin AC”, “activin AE”, “activin BC”, or “activin BE” are agents that inhibit one or more activities as mediated by the β_{A} subunit and one or more activities as mediated by the β_{B} subunit. The same principle applies to agents that bind to and/or inhibit “activin AC”, “activin AE”, “activin BC”, or “activin BE”.

[0248] Nodal proteins have functions in mesoderm and endoderm induction and formation, as well as subsequent organization of axial structures such as heart and stomach in early embryogenesis. It has been demonstrated that dorsal tissue in a developing vertebrate embryo contributes predominantly to the axial structures of the notochord and pre-chordal plate while it recruits surrounding cells to form non-axial embryonic structures. Nodal appears to signal through both type I and type II receptors and intracellular effectors known as SMAD proteins. Studies support the idea that ActRIIA and ActRIIB serve as type II receptors for nodal. See, e.g., Sakuma et al. (2002) Genes Cells. 2002, 7:401-12. It is suggested that Nodal ligands interact with their co-factors (e.g., Cripto or Cryptic) to activate activin type I and type II receptors, which phosphorylate SMAD2. Nodal proteins are implicated in many events critical to the early vertebrate embryo, including mesoderm formation, anterior patterning, and left-right axis specification. Experimental evidence has demonstrated that nodal signaling activates pAR3-Lux, a luciferase reporter previously shown to respond specifically to activin and TGF-beta. However, nodal is unable to induce pTlx2-Lux, a reporter specifically responsive to bone morphogenetic proteins. Recent results provide direct biochemical evidence that nodal signaling is mediated by SMAD2 and SMAD3, which also mediate signaling by TGF-betas and activins. Further evidence has shown that the extracellular protein Cripto or Cryptic is required for nodal signaling, making it distinct from activin or TGF-beta signaling.

[0249] The BMPs and GDFs together form a family of cysteine-knot cytokines sharing the characteristic fold of the TGF-beta superfamily. See, e.g., Rider et al. (2010) Biochem J., 429(1):1-12. This family includes, for example, BMP2, BMP4, BMP6, BMP7, BMP2a, BMP3, BMP3b (also known as GDF10), BMP4, BMP5, BMP6, BMP7, BMP8, BMP8a, BMP8b, BMP9 (also known as GDF2), BMP10, BMP11 (also known as GDF11), BMP12 (also known as GDF7), BMP13 (also known as GDF6), BMP14 (also known as GDF5), BMP15, GDF1, GDF3 (also known as VGR2), GDF8 (also known as myostatin), GDF9, GDF15, and decapentaplegic. Besides the ability to induce bone formation, which gave the BMPs their name, the BMP/GDFs display morphogenetic activities in the development of a wide range of tissues. BMP/GDF homo- and hetero-dimers interact with combinations of type I and type II receptor dimers to produce multiple possible signaling complexes, leading to the activation of one of two competing sets of SMAD transcription factors. BMP/GDFs have highly specific and localized functions. These are regulated in a number of ways, including the developmental restriction of BMP/GDF expression and through the secretion of several specific BMP antagonist proteins that bind with high affinity to the cytokines. Curiously, a number of these antagonists resemble TGF-beta superfamily ligands.

[0250] Growth and differentiation factor-8 (GDF8) is also known as myostatin. GDF8 is a negative regulator of skeletal muscle mass and is highly expressed in developing and adult skeletal muscle. The GDF8 null mutation in transgenic mice is characterized by a marked hypertrophy and hyperplasia of skeletal muscle. See, e.g., McPherron et al., Nature (1997) 387:83-90. Similar increases in skeletal muscle mass are evident in naturally occurring mutations of GDF8 in cattle and, strikingly, in humans. See, e.g., Ashmore et al. (1974) Growth, 38:501-507; Swatland and Kieffer, J. Anim. Sci. (1994) 38:752-757; McPherron and Lee, Proc. Natl. Acad. Sci. USA (1997) 94:12457-12461; Kambadur et al., Genome Res. (1997) 7:910-915; and Schuelke et al. (2004) N Engl J Med, 350:2682-8. Studies have also shown that muscle wasting associated with HIV-infection in humans is accompanied by increases in GDF8 protein expression. See, e.g., Gonzalez-Cadavid et al., PNAS (1998) 95:14938-43. In addition, GDF8 can modulate the production of muscle-specific enzymes (e.g., creatine kinase) and modulate myoblast cell proliferation. See, e.g., International Patent Application Publication No. WO 00/43781). The GDF8 propeptide can noncovalently bind to the mature GDF8 domain dimer, inactivating its biological activity. See, e.g., Miyazono et al. (1988) J. Biol. Chem., 263: 6407-6415; Wakefield et al. (1988) J. Biol. Chem., 263; 7646-7654; and Brown et al. (1990) Growth Factors, 3: 35-43. Other proteins which bind to GDF8 or structurally related proteins and inhibit their biological activity include follistatin, and potentially, follistatin-related proteins. See, e.g., Gamer et al. (1999) Dev. Biol., 208: 222-232.

[0251] GDF11, also known as BMP11, is a secreted protein that is expressed in the tail bud, limb bud, maxillary and mandibular arches, and dorsal root ganglia during mouse development. See, e.g., McPherron et al. (1999) Nat. Genet., 22: 260-264; and Nakashima et al. (1999) Mech. Dev., 80: 185-189. GDF11 plays a unique role in patterning both mesodermal and neural tissues. See, e.g., Gamer et al. (1999) Dev Biol., 208:222-32. GDF11 was shown to be a negative regulator of chondrogenesis and myogenesis in developing chick limb. See, e.g., Gamer et al. (2001) Dev Biol., 229:407-20. The expression of GDF11 in muscle also suggests its role in regulating muscle growth in a similar way to GDF8. In addition, the expression of GDF11 in brain suggests that GDF11 may also possess activities that relate to the function of the nervous system. Interestingly, GDF11 was found to inhibit neurogenesis in the olfactory epithelium. See, e.g., Wu et al. (2003) Neuron., 37:197-207. Hence, GDF11 may have in vitro and in vivo applications in the treatment of diseases such as muscle diseases and neurodegenerative diseases (e.g., amyotrophic lateral sclerosis).

[0252] BMP7, also called osteogenic protein-1 (OP-1), is well known to induce cartilage and bone formation. In addition, BMP7 regulates a wide array of physiological processes. For example, BMP7 may be the osteoinductive factor responsible for the phenomenon of epithelial osteogenesis. It is also found that BMP7 plays a role in calcium regulation and bone homeostasis. Like activin, BMP7 binds to type II receptors, ActRIIA and ActRIIB. However, BMP7 and activin recruit distinct type I receptors into heteromeric receptor complexes. The major BMP7 type I receptor observed was ALK2, while activin bound exclusively to ALK4 (ActRIIB). BMP7 and activin elicited distinct biological responses and activated different SMAD pathways. See, e.g., Macias-Silva et al. (1998) J Biol Chem. 273:25628-36.

[0253] Anti-Mullerian hormone (AMH), also known as Mullerian-inhibiting substance (MIS), is a TGF-beta family glycoprotein. One AMH-associated type II receptor has been identified and is designated as AMHRII, or alternatively MISRII. AMH induces regression of the Mullerian ducts in the human male embryo. AMH is expressed in reproductive age women and does not fluctuate with cycle or pregnancy, but was found to gradual decrease as both oocyte quantity and quality decrease, suggesting AMH could serve as a biomarker for ovarian physiology. See e.g. Zec et al., (2011) Biochemia Medica 21(3): 219-30.

[0254] Activin receptor-like kinase-1 (ALK1), the product of the ACVRL1 gene known alternatively as ACVRLK1, is a type I receptor whose expression is predominantly restricted to endothelial cells. See, e.g., OMIM entry 601284. ALK1 is activated by the binding of TGF-beta family ligands such as BMP9 and BMP10, and ALK1 signaling is critical in the regulation of both developmental and pathological blood vessel formation. ALK1 expression overlaps with sites of vasculogenesis and angiogenesis in early mouse development, and ALK1 knockout mice die around embryonic day 11.5 because of severe vascular abnormalities (see e.g., Cunha and Pietras (2011) Blood 117(26):6999-7006.) ALK1 expression has also been described in other cell types such as hepatic stellate cells and chondrocytes. Additionally, ALK1 along with activin receptor-like kinase-2 (ALK2) have been found to be important for BMP9-induced osteogenic signaling in mesenchymal stem cells. See e.g., Cunha and Pietras (2011) Blood 117(26):6999-7006.

[0255] ALK2, the product of the ACVR1 gene known alternatively as ActRIA or ACVRLK2, is a type I receptor that has been shown to bind activins and BMPs. ALK2 is critical for embryogenesis as ALK2 knockout mice die soon after gastrulation. See, e.g., Mishina et al. (1999) Dev Biol. 213: 314-326 and OMIM entry 102576. Constitutively active mutations in ALK2 are associated with fibrodysplasia ossificans progressiva (FOP). FOP is rare genetic disorder that causes fibrous tissue, including muscle, tendon and ligament, to be ossified spontaneously or when damaged. An arginine to histidine mutation in codon 206 of ALK2 is naturally occurring mutation associated with FOP in humans. This mutation induces BMP-specific signaling via ALK2 without the binding of ligand. See, e.g., Fukuda et al., (2009) J Biol Chem. 284(11):7149-7156 and Kaplan et al., (2011) Ann N.Y. Acad Sci. 1237: 5-10.

[0256] Activin receptor-like kinase-3 (ALK3), the product of the BMPR1A gene known alternatively as ACVRLK3, is a type I receptor mediating effects of multiple ligands in the BMP family. Unlike several type I receptors with ubiquitous tissue expression, ALK3 displays a restricted pattern of expression consistent with more specialized functionality. See, e.g., ten Dijke (1993) Oncogene, 8: 2879-2887 and OMIM entry 601299. ALK3 is generally recognized as a high affinity receptor for BMP2, BMP4, BMP7 and other members of the BMP family. BMP2 and BMP7 are potent stimulators of osteoblastic differentiation, and are now used clinically to induce bone formation in spine fusions and certain non-union fractures. ALK3 is regarded as a key receptor in mediating BMP2 and BMP4 signaling in osteoblasts. See, e.g., Lavery et al. (2008) J. Biol. Chem. 283: 20948-20958. A homozygous ALK3 knockout mouse dies early in embryogenesis (day 9.5), however, adult mice carrying a conditional disruption of ALK3 in osteoblasts have been recently reported to exhibit increased bone mass, although the newly formed bone showed evidence of disorganization. See, e.g., Kamiya (2008) J. Bone Miner. Res., 23:2007-2017; and Kamiya (2008) Development 135: 3801-3811. This finding is in startling contrast to the effectiveness of BMP2 and BMP7 (ligands for ALK3) as bone building agents in clinical use.

[0257] Activin receptor-like kinase-4 (ALK4), the product of the ACVR1B gene alternatively known as ACVRLK4, is a type I receptor that transduces signaling for a number of TGF-beta family ligands including activins, nodal and GDFs. ALK4 mutations are associated with pancreatic cancer and expression of dominant negative truncated ALK4 isoforms are highly expressed in human pituitary tumors. See, e.g., Tsuchida et al., (2008) Endocrine Journal 55(1):11-21 and OMIM entry 601300.

[0258] Activin receptor-like kinase-5 (ALK5), the product of the TGFBR1 gene, is widely expressed in most cell types. Several TGF-beta superfamily ligands, including TGF-betas, activin, and GDF-8, signal via ALK5 and activate downstream Smad 2 and Smad 3. Mice deficient in ALK5 exhibit severe defects in the vascular development of the yolk sac and placenta, lack circulating red blood cells, and die mid-gestation. It was found that these embryos had normal hematopoietic potential, but enhanced proliferation and improper migration of endothelial cells. Thus, ALK5-dependent signaling is important for angiogenesis, but not for the development of hematopoietic progenitor cells and functional hematopoiesis. See, e.g. Larsson et al., (2001) The EMBO Journal, 20(7): 1663-1673 and OMIM entry 190181. In endothelial cells, ALK5 acts cooperatively and opposite to ALK1 signaling. ALK5 inhibits cell migration and proliferation, notably the opposite effect of ALK1. See, e.g., Goumans et al. (2003) Mol Cell 12(4): 817-828. Additionally, ALK5 is believed to negatively regulate muscle growth. Knockdown of ALK5 in the muscle a mouse model of muscular dystrophy was found to decrease fibrosis and increase expression of genes associate with muscle growth. See, e.g. Kemaladewi et al., (2014) Mol Ther Nucleic Acids 3, e156.

[0259] Activin receptor-like kinase-6 (ALK6) is the product of the BMPR1B gene, whose deficiency is associated with chrondodysplasia and limb defects in both humans and mice. See, e.g., Demirhan et al., (2005) J Med Genet. 42:314-317. ALK6 is widely expressed throughout the developing skeleton, and is required for chondrogenesis in mice. See, e.g., Yi et al., (2000) Development 127:621-630 and OMIM entry 603248.

[0260] Activin receptor-like kinase-7 (ALK7) is the product of the ACVR1C gene. ALK7 null mice are viable, fertile, and display no skeletal or limb malformations. GDF3 signaling through ALK7 appears to play a role in insulin sensitivity and obesity. This is supported by results that Alk7 null mice show reduced fat accumulation and resistance to diet-induced obesity. See, e.g., Andersson et al., (2008) PNAS 105(20): 7252-7256. ALK7-mediated Nodal signaling has been implicated to have both tumor promoting and tumor suppressing effects in a variety of different cancer cell lines. See, e.g., De Silva et al., (2012) Frontiers in Endocrinology 3:59 and OMIM entry 608981.

[0261] As used herein the term “ActRII” refers to the family of type II activin receptors. This family includes both the activin receptor type IIA (ActRIIA), encoded by the ACVR2A gene, and the activin receptor type IIB (ActRIIB), encoded by the ACVR2B gene. ActRII receptors are TGF-beta superfamily type II receptors that bind a variety of TGF-beta superfamily ligands including activins, GDF8 (myostatin), GDF11, and a subset of BMPs, notably BMP6 and BMP7. ActRII receptors are implicated in a variety of biological disorders including muscle and neuromuscular disorders (e.g., muscular dystrophy, amyotrophic lateral sclerosis (ALS), and muscle atrophy), undesired bone/cartilage growth, adipose tissue disorders (e.g., obesity), metabolic disorders (e.g., type 2 diabetes), and neurodegenerative disorders. See, e.g., Tsuchida et al., (2008) Endocrine Journal 55(1):11-21, Knopf et al., U.S. Pat. No. 8,252,900, and OMIM entries 102581 and 602730.

[0262] Transforming growth factor beta receptor II (TGFBRII), encoded by the TGFBR2 gene, is a type II receptor that is known to bind TGF-beta ligands and activate downstream Smad 2 and Smad 3 effectors. See, e.g., Hinck (2012) FEBS Letters 586: 1860-1870 and OMIM entry 190182. TGF-beta signaling through TGFBRII is critical in T-cell proliferation, maintenance of T regulatory cells and proliferation of precartilaginous stem cells. See, e.g., Li et al., (2006) Immunity 25(3): 455-471 and Cheng et al., Int. J. Mol. Sci. 2014, 15, 12665-12676.

[0263] Bone morphogenetic protein receptor II (BMPRII), encoded by the BMPR2 gene, is a type II receptor that is thought to bind certain BMP ligands. In some instances, efficient ligand binding to BMPRII is dependent on the presence of the appropriate TGFBR type I receptors. See, e.g., Rosenzweig et al., (1995) PNAS 92:7632-7636. Mutations in BMPRII are associated pulmonary hypertension in humans. See OMIM entry 600799.

[0264] Müllerian-inhibiting substance receptor II (MISRII), the product of the AMHR2 gene known alternatively as anti-Müllerian hormone type II receptor, is a type II TGF-beta receptor. MISRII binds the MIS ligand, but requires the presence of an appropriate type I receptor, such as ALK3 or ALK6, for signal transduction. See, e.g., Hinck (2012) FEBS Letters 586:1860-1870 and OMIM entry 600956. MISRII is involved in sex differentiation in humans and is required for Müllerian regression in the human male. AMH is expressed in reproductive age women and does not fluctuate with cycle or pregnancy, but was found to gradual decrease as both oocyte quantity and quality decrease, suggesting AMH could serve as a biomarker of ovarian physiology. See, e.g., Zec et al., (2011) Biochemia Medica 21(3): 219-30 and OMIM entry 600956.

[0265] In certain aspects, the present invention relates to ENG polypeptides. The protein endoglin (ENG), also known as CD105 and encoded by ENG, is considered a co-receptor for the transforming growth factor-β (TGF-β) superfamily of ligands and is implicated in normal and pathological fibrosis and angiogenesis. Structurally, ENG is a homodimeric cell-surface glycoprotein. It belongs to the zona pellucida (ZP) family of proteins and consists of a short C-terminal cytoplasmic domain, a single hydrophobic transmembrane domain, and a long extracellular domain (ECD) (Gougos et al, 1990, J Biol Chem 265:8361-8364). As determined by electron microscopy, monomeric ENG ECD consists of two ZP regions and an orphan domain located at the N-terminus (Llorca et al, 2007, J Mol Biol 365:694-705).

[0266] ENG expression is low in quiescent vascular endothelium but upregulated in endothelial cells of healing wounds, developing embryos, inflammatory tissues, and solid tumors (Dallas et al, 2008, Clin Cancer Res 14:1931-1937). Mice homozygous for null ENG alleles die early in gestation due to defective vascular development (Li et al, 1999, Science 284:1534-1537), whereas heterozygous null ENG mice display angiogenic abnormalities as adults (Jerkic et al, 2006, Cardiovasc Res 69:845-854). In humans, ENG gene mutations have been identified as the cause of hereditary hemorrhagic telangiectasia (Osler-Rendu-Weber syndrome) type-1 (HHT-1), an autosomal dominant form of vascular dysplasia characterized by arteriovenous malformations resulting in direct flow (communication) from artery to vein (arteriovenous shunt) without an intervening capillary bed (McAllister et al, 1994, Nat Genet 8:345-351; Fernandez-L et al, 2006, Clin Med Res 4:66-78). Typical symptoms of patients with HHT include recurrent epistaxis, gastrointestinal hemorrhage, cutaneous and mucocutaneous telangiectases, and arteriovenous malformations in the pulmonary, cerebral, or hepatic vasculature.

[0267] As a co-receptor, ENG is thought to modulate responses of other receptors to TGF-β family ligands without direct mediation of ligand signaling by itself. Ligands in the TGF-β family typically signal by binding to a homodimeric type II receptor, which triggers recruitment and transphosphorylation of a homodimeric type I receptor, thereby leading to phosphorylation of Smad proteins responsible for transcriptional activation of specific genes (Massague, 2000, Nat Rev Mol Cell Biol 1:169-178). Based on ectopic cellular expression assays, it has been reported that ENG cannot bind ligands on its own and that its binding to TGF-β1, TGF-β3, activin A, bone morphogenetic protein-2 (BMP-2), and BMP-7 requires the presence of an appropriate type I and/or type II receptor (Barbara et al, 1999, J Biol Chem 274:584-594). Nevertheless, there is evidence that ENG expressed by a fibroblast cell line can bind TGF-β1 (St.-Jacques et al, 1994, Endocrinology 134:2645-2657), and recent results in COS cells indicate that transfected full-length ENG can bind BMP-9 in the absence of transfected type I or type II receptors (Scharpfenecker et al, 2007, J Cell Sci 120:964-972).

[0268] In addition to the foregoing, ENG can occur in a soluble form in vivo under certain conditions after proteolytic cleavage of the full-length membrane-bound protein (Hawinkels et al, 2010, Cancer Res 70:4141-4150). Elevated levels of soluble ENG have been observed in the circulation of patients with cancer and preeclampsia (Li et al, 2000, Int J Cancer 89:122-126; Calabro et al, 2003, J Cell Physiol 194:171-175; Venkatesha et al, 2006, Nat Med 12:642-649; Levine et al, 2006, N Engl J Med 355:992-1005). Although the role of endogenous soluble ENG is poorly understood, a protein corresponding to residues 26-437 of the ENG precursor (amino acids 26-437 of SEQ ID NO: 1) has been proposed to act as a scavenger or trap for TGF-β family ligands (Venkatesha et al, 2006, Nat Med 12:642-649; WO-2007/143023), of which only TGF-β1 and TGF-β3 have specifically been implicated.

[0269] In certain aspects, the present invention relates to betaglycan polypeptides. Betaglycan, also known as TGFβ receptor type III (TβRIII, TGFβRIII) and encoded by TGFBR3, is a single-pass transmembrane protein consisting of a large extracellular domain, transmembrane domain, and relatively short cytoplasmic domain (43 amino acids). It is thought that betaglycan is not directly involved in signal transduction since its cytoplasmic domain lacks an obvious signaling motif. Consistent with a co-receptor role, the presence of betaglycan on the cell surface increases the binding of TGFβ isoforms to their type II receptor (TGFβRII) and increases ligand efficacy in biologic assays (Bilandzic et al., 2011, Mol Cell Endocrinol 339:180-189). This effect is most pronounced for TGFβ2, which binds weakly to TGFβRII in the absence of betaglycan (Lopez-Casillas et al., 1993, 1994). In addition, the extracellular domain of betaglycan is released from some cells in a soluble form whose physiologic role remains to be determined.

[0270] Betaglycan can alter signaling by superfamily ligands besides TGFβ. For example, inhibin is capable of binding ActRIIA or ActRIIB and functionally antagonizing activins by preventing recruitment of activin type I receptors. However, inhibin requires the presence of betaglycan for high potency inhibition of activin signaling (Lewis et al., 2000, Nature 404:411-414; Wiater et al., 2009, Mol Endocrinol 23:1033-1042). Betaglycan forms a stable complex with inhibin and activin type II receptors, thus reducing the availability of these receptors to transmit activin signaling (Lewis et al., 2000, Nature 404:411-414). In a similar manner, betaglycan enables inhibin to antagonize the binding of BMPs to ActRIIA, ActRIIB, or BMPRII, thereby inhibiting BMP signaling (Wiater et al., 2003, J Biol Chem 278:7934-7941).

[0271] In certain aspects, the present invention relates to EGF-CFC family polypeptides. Members of the epidermal growth factor-Cripto-1/FRL-1/Cryptic (EGF-CFC) family in humans include founder Cripto-1 (encoded by TDGF1) as well as Cryptic protein (encoded by CFC1) and Cryptic family protein 1B (encoded by CFC1B). EGF-CFC genes encode small extracellular proteins that contain a divergent EGF motif and a novel conserved cysteine-rich domain termed the CFC motif, with most sequence similarity occurring in the central EGF and CFC motifs (Shen et al., 2000, Trends Genet 16:303-309). Most EGF-CFC proteins have been shown or predicted to possess a glycosylphosphatidylinositol (GPI) anchor site at the C-terminus. However, soluble extracellular forms of these proteins also exist (see, e.g., Watanabe et al., 2007, J Biol Chem 282:31643-31655).

[0272] In certain aspects, the present invention relates to Cripto-1 polypeptides. Cripto-1, also known as Cripto or teratocarcinoma-derived growth factor (TDGF-1), regulates the activity of multiple TGFβ superfamily ligands that signal via the Smad2/3 pathway. Cripto-1 functions as an obligatory cell-surface co-receptor for a subset of ligands including Nodal, GDF1, and GDF3 (Gray et al., 2012, FEBS Lett 586:1836-1845). Cripto-1 acts as a co-receptor for Nodal by recruiting ALK4, leading to formation of an ActRIIB-ALK4-Cripto-Nodal complex for signaling (Rosa, 2002, Sci STKE 2002(158):pe47; Yan et al., 2002, Mol Cell Biol 22:4439-4449; Blanchet et al., 2008, Sci Signal 1(45):ra13). This co-receptor function plays essential roles in regulating stem cell differentiation and vertebrate embryogenesis and regulates normal tissue growth and remodeling in adult tissues. See, e.g., Guardiola et al. (2012) Proc Natl Acad Sci USA 109:E3231-E3240. Cripto-1 co-receptor function has also been linked to tumor growth since Nodal signaling plays a key role in promoting tumorigenicity. In addition to facilitating signaling by some ligands, Cripto-1 inhibits receptor activation by activin A, activin B, myostatin (GDF8), and TGFβ (Gray et al., 2003, Proc Natl Acad Sci USA 100:5193-5198; Gray et al., 2006, Mol Cell Biol 26:9268-9278; Guardiola et al., 2012, Proc Natl Acad Sci USA 109:E3231-E3240). It has been shown in a detailed analysis that Cripto-1 forms analogous receptor complexes with Nodal and activin and thereby functions as a noncompetitive activin antagonist (Kelber et al., 2008, J Biol Chem 283:4490-4500).

[0273] In certain aspects, the present invention relates to Cryptic and Cryptic family 1B polypeptides. On the basis of phenotypes in double null mutant mice, Cryptic and Cripto-1 have been found to serve partially redundant functions during early embryonic development, and most if not all Nodal activity in early mouse embryogenesis is thought to be dependent on these two EGF-CFC proteins (Chu et al., 2010, Dev Biol 342:63-73). A separate study of mice deficient only in Cryptic has revealed a role for this protein in correct establishment of left-right asymmetry during embryogenesis (Gaio et al., 1999, Curr Biol 9:1339-1342).

[0274] In certain aspects, the present invention relates to chordin-related polypeptides. Proteins in this family contain chordin-like cysteine-rich repeat (CRR) motifs of the von Willebrand C (VWC) type which are important for protein binding to superfamily ligands. Such CRRs have a conserved consensus sequence based on ten cysteines (CXₙWX₄CX₂CXCX₆CX₄CX₄₋₆CX₉₋₁₁CCPXC) (Sasai et al., 1994, Cell 79:779-790; Garcia-Abreu et al., 2002, Gene 287:39-47). Examples of chordin-related proteins include BMPER, CRIM1, and CRIM2.

[0275] In certain aspects, the present invention relates to BMPER polypeptides. BMP-binding endothelial cell precursor-derived regulator (BMPER) is encoded by BMPER and is the human homolog of Drosophila Crossveinless-2 (CV-2). BMPER is a secreted protein containing five CCR motifs and is reported to be proteolytically cleaved to generate two fragments that are disulfide-linked (Moser et al., 2003, Mol Cell Biol 23:5664-5679; Binnerts et al., 2004, Biochem Biophys Res Commun 315:272-280). Mammalian BMPER was originally identified as an inhibitor of BMP signaling. However, subsequent investigation determined that BMPER can exert biphasic activity depending on concentration, enhancing BMP-mediated signaling at molar concentrations less than that of ligand but inhibiting such signaling at concentrations exceeding those of ligand (Kelley et al., 2009, J Cell Biol 184:597-609). BMPER is implicated in a wide range of BMP-mediated differentiation processes during embryonic development and also implicated as an important postnatal regulator of BMP-mediated vascular inflammation in mice (Pi et al., 2012, Arterioscler Thromb Vasc Biol 32:2214-2222).

[0276] In certain aspects, the present invention relates to CRIM1 polypeptides. Cysteine-rich motor neuron 1 (CRIM1), also known as “cysteine-rich transmembrane BMP regulator 1”, is encoded by CRIM1. This type I transmembrane protein contains a signal sequence, an extracellular domain (905 amino acids), a transmembrane domain (21 amino acids), and an intracellular domain (76 amino acids). The extracellular domain can also be released from the cell as a soluble form, likely via cleavage of the full protein at the membrane (Wilkinson et al., 2003, J Biol Chem 278:34181-34188), and contains an N-terminal insulin-like growth factor-binding motif and six chordin-like CRR motifs of the VWC type. These CRRs mediate protein binding to superfamily ligands such as TGFβ isoforms, BMP4, and BMP7 (see, e.g., Wilkinson et al., 2003, J Biol Chem 278:34181-34188). CRIM1 inhibits BMP signaling in part by reducing the rate of processing and delivery of BMPs to the cell surface. Studies in transgenic mice expressing a dominant negative (truncated) CRIM1 isoform indicate the importance of CRIM1 for normal development of the eye, central nervous system, and kidney (Pennisi et al., 2007, Dev Dyn 236:502-511; Wilkinson et al., 2007, J Am Soc Nephrol 18:1697-1708).

[0277] In certain aspects, the present invention relates to CRIM2 polypeptides. CRIM2 is a secreted protein encoded by the human gene KCP (kielin/chordin-like protein 1), named in recognition of the protein's sequence similarity to Xenopus kielin and mouse chordin. The longest CRIM2 isoform, which is nearly 1500 amino acids in human, contains many CRR motifs of the VWC type. Unlike most inhibitory proteins containing CRR motifs, CRIM2 is a potent enhancer of BMP signaling and is able to increase the affinity of BMP7 for its type I receptor ALK3 and/or enhance the stability of this ligand-receptor complex in mice (Lin et al., 2005, Nat Med 11:387-393). Mice homozygous for a CRIM2 null allele are viable and fertile but are hypersensitive to developing renal interstitial fibrosis, a disease stimulated by TGFβ but inhibited by BMP7. In contrast to the enhancing effect on BMPs, CRIM2 inhibits both activin A-mediated and TGFβ1-mediated signaling through the Smad2/3 pathway (Lin et al., 2006, Mol Cell Biol 26:4577-4585). These inhibitory effects of CRIM2 are mediated in a paracrine manner, suggesting that direct binding of CRIM2 to TGFβ1 or activin A can block interactions of these ligands with prospective receptors. The ability to enhance BMP signaling while suppressing activation by TGFβ and activin indicates an important role for CRIM2 in modulating responses between these antifibrotic and profibrotic cytokines in the initiation and progression of renal interstitial fibrosis.

[0278] In certain aspects, the present invention relates to BAMBI polypeptides. The protein named “BMP and activin membrane-bound inhibitor” (BAMBI), also known as “non-metastatic gene A” (NMA), is encoded by BAMBI. BAMBI resembles a type I receptor from the TGFβ superfamily, with an extracellular domain (132 amino acids), a transmembrane domain, and a cytoplasmic domain. However, BAMBI lacks an intracellular kinase domain and has therefore been described as a pseudoreceptor (Onichtchouk et al., 1999, Nature 401:480-485). BAMBI competes with type I receptors to form stable complexes with type II receptors and thereby prevents the formation of active complexes of type I and type II receptors. Additionally, BAMBI cooperates with Smad7 to inhibit ligand-mediated signaling (Yan et al., 2009, J Biol Chem 284:30097-30104). Ligands inhibited by BAMBI include BMPs, activin, and TGFβ. During development, BAMBI is prominent in gastrulation, neurulation, and development of bones and teeth, and is often co-expressed with BMP family members (Onichtchouk et al., 1999, Nature 401:480-485; Knight et al., J Dent Res 80:1895; Paulsen et al., 2011, Proc Natl Acad Sci USA 108:10202-). In the adult, BAMBI modulates processes such as diabetic nephropathy, thrombus formation, response to cardiac overload, and TGFβ-mediated tumor invasiveness (Villar et al., 2013, Biochim Biophys Acta 1832:323-335; Salles-Crawley et al., 2014, Blood 123:2873-2881; Fan et al., 2015, Diabetes 64:2220-2233; Marwitz et al., 2016, Cancer Res 76:3785-3801).

[0279] In certain aspects, the present invention relates to repulsive guidance molecule (RGM) polypeptides. RGMs constitute a family of structurally related proteins that have been proposed to act as co-receptors for BMP signaling and also interact with an unrelated transmembrane protein known as neogenin. The three mammalian proteins, RGM-A, RGM-B, and RGM-C, are approximately 50-60% identical in primary amino acid sequence and share structural features such as a proteolytic cleavage site and GPI anchor but undergo distinct biosynthetic and processing steps. Each RGM exhibits a distinct tissue-specific pattern of gene expression (Oldecamp et al., 2004, Gene Expr Patterns 4:283-288) and is thought to serve distinct biologic functions (see below). Soluble RGM proteins, which could form by shedding (Lin et al., 2008, Blood Cells Mol Dis 40:122-131; Tassew et al., 2012, Dev Cell 22:391-402), have been shown to inhibit BMP activity (Lin et al., 2005, Blood 106:2884-2889). A recent structural study reveals that the N-terminal domains of RGMs mimic a key BMP-binding motif of type I superfamily receptors, which could enable membrane-anchored RGMs to compete with type I receptors for BMP binding in a pH-dependent manner and yet eventually enhance BMP signaling from within an endosomal compartment (Healey et al., 2015, Nat Struct Mol Biol 22:458-465; Mueller, 2015, Nat Struct Mol Biol 22:439-440). As determined by surface plasmon resonance, the three RGM proteins exhibit differential binding kinetics for BMPs, which may contribute to their context-specific effects in vivo (Wu et al., 2012, PLOS One 7:e46307).

[0280] The protein RGM-A, encoded by RGMA, is expressed in the central nervous system during embryonic development in a largely non-overlapping manner with RGM-B. In the adult, RGM-A is expressed in brain as well as many other tissues, and it has been implicated in cancer, immune regulation, and as a sarcoplasmic protein regulating differentiation and size of skeletal muscle cells (Tian et al., 2013, Mol Reprod Dev 80:700-717; Martins et al., 2014, Cells Tissues Organs 200:326-338). Studies of RGM-A in several cell types in vitro suggest that it increases BMP signaling by facilitating use of ActRIIA by endogenous BMP2 and BMP4 ligands that otherwise prefer signaling through BMPRII (Xia et al., 2007, J Biol Chem 282:18129-18140).

[0281] RGM-B, also known as DRAGON and encoded by RGMB. Like RGM-A, RGM-B is expressed in brain as well as many other tissues of the adult. RGM-B knockout mice die several weeks after birth for undetermined reasons (Xia et al., 2011, J Immunol 186:1369-1376). RGM-B binds BMP2 and BMP4 but not BMP7, activin A, or TGFβ isoforms, as determined by surface plasmon resonance, and interacts directly with type I receptors (ALK2, ALK3, and ALK6) and type II receptors (ActRIIA and ActRIIB), as determined by co-immunoprecipitation and blockade with dominant negative receptors (Samad et al., 2005, J Biol Chem 280:14122-14129). The ability of RGM-B to increase BMP signaling requires membrane association through its C-terminal GPI anchor.

[0282] The protein RGM-C, also known as hemojuvelin (HJV) and encoded by HFE2, is associated with juvenile hemochromatosis, a rare recessive disease characterized by early-onset systemic iron overload with severe clinical complications. Hemojuvelin is now known to be an essential factor in the regulation of hepcidin, a master regulator of iron homeostasis (Niederkofler et al., 2005, J Clin Invest 115:2180-2186). Hemojuvelin is expressed primarily in liver, consistent with the predominant site of hepcidin regulation, and also in heart and skeletal muscle, where the role of hemojuvelin is unclear. Multiple studies have demonstrated that hemojuvelin regulates hepcidin expression in the liver by altering BMP signaling. Unlike RGM-A and RGM-B, hemojuvelin binds with high affinity to BMP6, a key ligand regulating hepcidin expression (Andriopoulos et al., 2009, Nat Genet 41:482-487), in addition to binding BMP2 and BMP4. On the basis of siRNA knockdown experiments in cell lines and hepatic expression of superfamily proteins, it has been suggested that hemojuvelin promotes endogenous signaling of BMP2, BMP4, and BMP6 through ALK2 or ALK3 and ActRIIA (Xia et al., 2008, Blood 111:5195-5204).

[0283] In certain aspects, the present invention relates to MuSK polypeptides. Muscle-associated receptor tyrosine kinase (MuSK), also known as muscle-specific kinase, CMS9, or FADS, is encoded by MUSK. MuSK is a single-pass transmembrane protein originally identified as a receptor tyrosine kinase expressed prominently in embryonic skeletal muscle and at the mature neuromuscular junction (Valenzuela et al., 1995, Neuron 15:573-584). These investigators showed that MuSK expression is induced dramatically throughout the adult myofiber after denervation, blockade of electrical activity, or physical immobilization. Subsequent studies indicate that MuSK is activated by proteins structurally unrelated to the TGFβ superfamily in a complex temporal-spatial manner to promote and maintain clustering of acetylcholine receptors on the postsynaptic side of the neuromuscular junction and to induce differentiation of the presynaptic nerve terminal (Hubbard et al., 2013, Biochim Biophys Acta 1834:2166-2169). Surprisingly, recent studies have revealed that MuSK also serves as a BMP co-receptor which is capable of binding BMPs and type I receptors (ALK3, ALK6) and stimulating BMP signaling by a mechanism independent of MuSK tyrosine kinase activity (Yilmaz et al., 2016, Sci Signal 9:ra87).

[0284] The terms used in this specification generally have their ordinary meanings in the art, within the context of this disclosure and in the specific context where each term is used. Certain terms are discussed below or elsewhere in the specification to provide additional guidance to the practitioner in describing the compositions and methods of the disclosure and how to make and use them. The scope or meaning of any use of a term will be apparent from the specific context in which it is used.

[0285] The terms “heteromultimer complex”, “heteromer”, or “heteromultimer” is a complex comprising at least a first polypeptide and a second polypeptide, wherein the second polypeptide differs in amino acid sequence from the first polypeptide by at least one amino acid residue. The heteromer can comprise a “heterodimer” formed by the first and second polypeptide or can form higher order structures where polypeptides in addition to the first and second polypeptide are present. Exemplary structures for the heteromultimer include heterodimers, heterotrimers, heterotetramers and further oligomeric structures. Heterodimers are designated herein as X:Y or equivalently as X-Y, where X represents a first polypeptide and Y represents a second polypeptide. Higher-order heteromers and oligomeric structures are designated herein in a corresponding manner. In certain embodiments a heteromultimer is recombinant (e.g., one or more polypeptide components may be a recombinant protein), isolated and/or purified.

[0286] “Homologous,” in all its grammatical forms and spelling variations, refers to the relationship between two proteins that possess a “common evolutionary origin,” including proteins from superfamilies in the same species of organism, as well as homologous proteins from different species of organism. Such proteins (and their encoding nucleic acids) have sequence homology, as reflected by their sequence similarity, whether in terms of percent identity or by the presence of specific residues or motifs and conserved positions. However, in common usage and in the instant application, the term “homologous,” when modified with an adverb such as “highly,” may refer to sequence similarity and may or may not relate to a common evolutionary origin.

[0287] The term “sequence similarity,” in all its grammatical forms, refers to the degree of identity or correspondence between nucleic acid or amino acid sequences that may or may not share a common evolutionary origin.

[0288] “Percent (%) sequence identity” with respect to a reference polypeptide (or nucleotide) sequence is defined as the percentage of amino acid residues (or nucleic acids) in a candidate sequence that are identical to the amino acid residues (or nucleic acids) in the reference polypeptide (nucleotide) sequence, after aligning the sequences and introducing gaps, if necessary, to achieve the maximum percent sequence identity, and not considering any conservative substitutions as part of the sequence identity. Alignment for purposes of determining percent amino acid sequence identity can be achieved in various ways that are within the skill in the art, for instance, using publicly available computer software such as BLAST, BLAST-2, ALIGN or Megalign (DNASTAR) software. Those skilled in the art can determine appropriate parameters for aligning sequences, including any algorithms needed to achieve maximal alignment over the full length of the sequences being compared. For purposes herein, however, % amino acid (nucleic acid) sequence identity values are generated using the sequence comparison computer program ALIGN-2. The ALIGN-2 sequence comparison computer program was authored by Genentech, Inc., and the source code has been filed with user documentation in the U.S. Copyright Office, Washington D.C., 20559, where it is registered under U.S. Copyright Registration No. TXU510087. The ALIGN-2 program is publicly available from Genentech, Inc., South San Francisco, Calif., or may be compiled from the source code. The ALIGN-2 program should be compiled for use on a UNIX operating system, including digital UNIX V4.0D. All sequence comparison parameters are set by the ALIGN-2 program and do not vary.

[0289] “Agonize”, in all its grammatical forms, refers to the process of activating a protein and/or gene (e.g., by activating or amplifying that protein's gene expression or by inducing an inactive protein to enter an active state) or increasing a protein's and/or gene's activity.

[0290] “Antagonize”, in all its grammatical forms, refers to the process of inhibiting a protein and/or gene (e.g., by inhibiting or decreasing that protein's gene expression or by inducing an active protein to enter an inactive state) or decreasing a protein's and/or gene's activity.

[0291] The terms “about” and “approximately” as used in connection with a numerical value throughout the specification and the claims denotes an interval of accuracy, familiar and acceptable to a person skilled in the art. In general, such interval of accuracy is ±10%, Alternatively, and particularly in biological systems, the terms “about” and “approximately” may mean values that are within an order of magnitude, preferably ≤5-fold and more preferably ≤2-fold of a given value.

[0292] Numeric ranges disclosed herein are inclusive of the numbers defining the ranges.

[0293] The terms “a” and “an” include plural referents unless the context in which the term is used clearly dictates otherwise. The terms “a” (or “an”), as well as the terms “one or more,” and “at least one” can be used interchangeably herein. Furthermore, “and/or” where used herein is to be taken as specific disclosure of each of the two or more specified features or components with or without the other. Thus, the term “and/or” as used in a phrase such as “A and/or B” herein is intended to include “A and B,” “A or B,” “A” (alone), and “B” (alone). Likewise, the term “and/or” as used in a phrase such as “A, B, and/or C” is intended to encompass each of the following aspects: A, B, and C; A, B, or C; A or C; A or B; B or C; A and C; A and B; B and C; A (alone); B (alone); and C (alone).

### 2. TGF-beta Superfamily Co-receptor, Type I Receptor, and Type II Receptor Polypeptides and Heteromultimers

[0294] In part, the disclosure provides recombinant TGF-beta superfamily heteromultimers (heteromultimers) comprising at least one TGF-beta superfamily co-receptor polypeptide (e.g., endoglin, betaglycan, Cripto-1, Cryptic, Cryptic family protein 1B, Crim1, Crim2, BAMBI, BMPER, RGM-A, RGM-B, hemojuvelin, and MuSK), including fragments and variants thereof. In some embodiments, the disclosure relates to a recombinant heteromultimer comprising a TGF-beta superfamily co-receptor polypeptide selected from the group consisting of: endoglin, betaglycan, Cripto-1, Cryptic, Cryptic family protein 1B, Crim1, Crim2, BAMBI, BMPER, RGM-A, RGM-B, hemojuvelin, and MuSK, including fragments and variants thereof, and a TGF-beta superfamily type I receptor polypeptide selected from the group consisting of: ALK1, ALK2, ALK3, ALK4, ALK5, ALK6, and ALK7, including fragments and variants thereof. In some embodiments, the disclosure relates to a recombinant heteromultimer comprising a TGF-beta superfamily co-receptor polypeptide selected from the group consisting of: endoglin, betaglycan, Cripto-1, Cryptic, Cryptic family protein 1B, Crim1, Crim2, BAMBI, BMPER, RGM-A, RGM-B, hemojuvelin, and MuSK, including fragments and variants thereof, and a TGF-beta superfamily type II receptor polypeptide selected from the group consisting of: ActRIIA, ActRIIB, TGFBRII, BMPRII, and MISRII, including fragments and variants thereof. In some embodiments, the disclosure relates to a recombinant heteromultimer comprising a first TGF-beta superfamily co-receptor polypeptide selected from the group consisting of: endoglin, betaglycan, Cripto-1, Cryptic, Cryptic family protein 1B, Crim1, Crim2, BAMBI, BMPER, RGM-A, RGM-B, hemojuvelin, and MuSK, including fragments and variants thereof, and a second TGF-beta superfamily co-receptor polypeptide selected from the group consisting of: endoglin, betaglycan, Cripto-1, Cryptic, Cryptic family protein 1B, Crim1, Crim2, BAMBI, BMPER, RGM-A, RGM-B, hemojuvelin, and MuSK, including fragments and variants thereof. Preferably, TGF-beta superfamily co-receptor, type I receptor, and type II receptor polypeptides as described herein comprise a ligand-binding domain of the receptor, for example, an extracellular domain of a TGF-beta superfamily co-receptor, type I receptor, or type II receptor. In other preferred embodiments, polypeptides and heteromultimers of the disclosure (e.g., co-receptor:type I receptor, co-receptor:type II receptor, and co-receptor:co-receptor heteromultimers) are soluble. In certain preferred embodiments, heteromultimers of the disclosure (e.g., co-receptor:type I receptor, co-receptor:type II receptor, and co-receptor:co-receptor heteromultimers) bind to one or more TGF-beta superfamily ligands (e.g., BMP2, BMP2/7, BMP3, BMP4, BMP4/7, BMP5, BMP6, BMP7, BMP8a, BMP8b, BMP9, BMP10, GDF3, GDF5, GDF6/BMP13, GDF7, GDF8, GDF9b/BMP15, GDF11/BMP11, GDF15/MIC1, TGF-β1, TGF-β2, TGF-β3, activin A, activin B, activin C, activin E, activin AB, activin AC, activin AE, activin BC, activin BE, nodal, glial cell-derived neurotrophic factor (GDNF), neurturin, artemin, persephin, Müllerian-inhibiting substance (MIS), and Lefty). In some embodiments, a heteromultimer (e.g., co-receptor:type I receptor, co-receptor:type II receptor, and co-receptor:co-receptor heteromultimers) may bind to one or more TGF-beta superfamily ligands with a K_{D} of at least 1×10⁻⁷ M (e.g., K_{D} of greater than or equal to 10⁻⁷, 10⁻⁸, 10⁻⁹, 10⁻¹⁰, 10⁻¹¹, or 10⁻¹²). In some embodiments, a heteromultimer of the disclosure (e.g., co-receptor:type I receptor, co-receptor:type II receptor, and co-receptor:co-receptor heteromultimers) has a different TGF-beta superfamily ligand binding and/or inhibition profile (specificity) compared to a corresponding homomultimer (e.g., endoglin:ALK1 heteromultimer vs. endoglin and ALK1 homomultimers). In some embodiments, a heteromultimer of the disclosure (e.g., co-receptor:type I receptor, co-receptor:type II receptor, and co-receptor:co-receptor heteromultimers) may inhibit one or more TGF-beta superfamily ligands (e.g., BMP2, BMP2/7, BMP3, BMP4, BMP4/7, BMP5, BMP6, BMP7, BMP8a, BMP8b, BMP9, BMP10, GDF3, GDF5, GDF6/BMP13, GDF7, GDF8, GDF9b/BMP15, GDF11/BMP11, GDF15/MIC1, TGF-β1, TGF-β2, TGF-β3, activin A, activin B, activin C, activin E, activin AB, activin AC, activin AE, activin BC, activin BE, nodal, glial cell-derived neurotrophic factor (GDNF), neurturin, artemin, persephin, Müllerian-inhibiting substance (MIS), and Lefty). In some embodiments, a heteromultimer of the disclosure (e.g., co-receptor:type I receptor, co-receptor:type II receptor, and co-receptor:co-receptor heteromultimers) may inhibit signaling of one or more TGF-beta superfamily ligands. For example, in some embodiments, a heteromultimer of the disclosure (e.g., co-receptor:type I receptor, co-receptor:type II receptor, and co-receptor:co-receptor heteromultimers) may inhibit signaling of one or more TGF-beta superfamily ligands in a cell-based assay (e.g., cell-based signaling assays as described herein). In some embodiments, heteromultimers of the disclosure are heterodimers.

[0295] As used herein, the term “ActRIIB” refers to a family of activin receptor type IIB (ActRIIB) proteins from any species and variants derived from such ActRIIB proteins by mutagenesis or other modification. Reference to ActRIIB herein is understood to be a reference to any one of the currently identified forms. Members of the ActRIIB family are generally transmembrane proteins, composed of a ligand-binding extracellular domain comprising a cysteine-rich region, a transmembrane domain, and a cytoplasmic domain with predicted serine/threonine kinase activity.

[0296] The term “ActRIIB polypeptide” includes polypeptides comprising any naturally occurring polypeptide of an ActRIIB family member as well as any variants thereof (including mutants, fragments, fusions, and peptidomimetic forms) that retain a useful activity. Examples of such variant ActRIIB polypeptides are provided throughout the present disclosure as well as in International Patent Application Publication Nos. WO 2006/012627, WO 2008/097541, and WO 2010/151426, which are incorporated herein by reference in their entirety.

[0297] The human ActRIIB precursor protein sequence is as follows:

| (SEQ ID NO: 1) | |
|---|---|
| 1 | MTAPWVALAL LWGSLCAGSG RGEAETRECI YYNANWELER TNQSGLERCE |
| 51 | GEQDKRLHCY ASWRNSSGTI ELVKKGCWLD DFNCYDRQEC VATEENPQVY |
| 101 | FCCCEGNFCN ERFTHLPEAG GPEVTYEPPP TAPTLLTVLA YSLLPIGGLS |
| 151 | LIVLLAFWMY RHRKPPYGHV DIHEDPGPPP PSPLVGLKPL QLLEIKARGR |
| 201 | FGCVWKAQLM NDFVAVKIFP LQDKQSWQSE REIFSTPGMK HENLLQFIAA |
| 251 | EKRGSNLEVE LWLITAFHDK GSLTDYLKGN IITWNELCHV AETMSRGLSY |
| 301 | LHEDVPWCRG EGHKPSIAHR DFKSKNVLLK SDLTAVLADF GLAVRFEPGK |
| 351 | PPGDTHGQVG TRRYMAPEVL EGAINFQRDA FLRIDMYAMG LVLWELVSRC |
| 401 | KAADGPVDEY MLPFEEEIGQ HPSLEELQEV VVHKKMRPTI KDHWLKHPGL |
| 451 | AQLCVTIEEC WDHDAEARLS AGCVEERVSL IRRSVNGTTS DCLVSLVTSV |
| 501 | TNVDLPPKES SI |

[0298] The signal peptide is indicated with a single underline; the extracellular domain is indicated in bold font; and the potential, endogenous N-linked glycosylation sites are indicated with a double underline.

[0299] A processed extracellular ActRIIB polypeptide sequence is as follows:

(SEQ ID NO: 2)

GRGEAETRECIYYNANWELERTNQSGLERCEGEQDKRLHCYASWRNSSGT
IELVKKGCWLDDFNCYDRQECVATEENPQVYFCCCEGNFCNERFTHLPEA
GGPEVTYEPPPTAP.

[0300] In some embodiments, the protein may be produced with an “SGR . . . ” sequence at the N-terminus. The C-terminal “tail” of the extracellular domain is indicated by a single underline. The sequence with the “tail” deleted (a 415 sequence) is as follows:

(SEQ ID NO: 3)

GRGEAETRECIYYNANWELERTNQSGLERCEGEQDKRLHCYASWRNSSGT
IELVKKGCWLDDFNCYDRQECVATEENPQVYFCCCEGNFCNERFTHLPE
A.

[0301] A form of ActRIIB with an alanine at position 64 of SEQ ID NO: 1 (A64) is also reported in the literature. See, e.g., Hilden et al. (1994) Blood, 83(8): 2163-2170. Applicants have ascertained that an ActRIIB-Fc fusion protein comprising an extracellular domain of ActRIIB with the A64 substitution has a relatively low affinity for activin and GDF11. By contrast, the same ActRIIB-Fc fusion protein with an arginine at position 64 (R64) has an affinity for activin and GDF11 in the low nanomolar to high picomolar range. Therefore, sequences with an R64 are used as the “wild-type” reference sequence for human ActRIIB in this disclosure.

[0302] The form of ActRIIB with an alanine at position 64 is as follows:

| (SEQ ID NO: 4) | |
|---|---|
| 1 | MTAPWVALAL LWGSLCAGSG RGEAETRECI YYNANWELER TNQSGLERCE |
| 51 | GEQDKRLHCY ASWANSSGTI ELVKKGCWLD DFNCYDRQEC VATEENPQVY |
| 101 | FCCCEGNFCN ERFTHLPEAG GPEVTYEPPP TAPTLLTVLA YSLLPIGGLS |
| 151 | LIVLLAFWMY RHRKPPYGHV DIHEDPGPPP PSPLVGLKPL QLLEIKARGR |
| 201 | FGCVWKAQLM NDFVAVKIFP LQDKQSWQSE REIFSTPGMK HENLLQFIAA |
| 251 | EKRGSNLEVE LWLITAFHDK GSLTDYLKGN IITWNELCHV AETMSRGLSY |
| 301 | LHEDVPWCRG EGHKPSIAHR DFKSKNVLLK SDLTAVLADF GLAVRFEPGK |
| 351 | PPGDTHGQVG TRRYMAPEVL EGAINFQRDA FLRIDMYAMG LVLWELVSRC |
| 401 | KAADGPVDEY MLPFEEEIGQ HPSLEELQEV VVHKKMRPTI KDHWLKHPGL |
| 451 | AQLCVTIEEC WDHDAEARLS AGCVEERVSL IRRSVNGTTS DCLVSLVTSV |
| 501 | TNVDLPPKES SI |

[0303] The signal peptide is indicated by single underline and the extracellular domain is indicated by bold font.

[0304] A processed extracellular ActRIIB polypeptide sequence of the alternative A64 form is as follows:

(SEQ ID NO: 5)

GRGEAETRECIYYNANWELERTNQSGLERCEGEQDKRLHCYASWANSSGT
IELVKKGCWLDDFNCYDRQECVATEENPQVYFCCCEGNFCNERFTHLPEA
GGPEVTYEPPPTAPT

[0305] In some embodiments, the protein may be produced with an “SGR . . . ” sequence at the N-terminus. The C-terminal “tail” of the extracellular domain is indicated by single underline. The sequence with the “tail” deleted (a 415 sequence) is as follows:

(SEQ ID NO: 6)

GRGEAETRECIYYNANWELERTNQSGLERCEGEQDKRLHCYASWANSSGT
IELVKKGCWLDDFNCYDRQECVATEENPQVYFCCCEGNFCNERFTHLPEA

[0306] A nucleic acid sequence encoding the human ActRIIB precursor protein is shown below (SEQ ID NO: 7), representing nucleotides 25-1560 of Genbank Reference Sequence NM_001106.3, which encode amino acids 1-513 of the ActRIIB precursor. The sequence as shown provides an arginine at position 64 and may be modified to provide an alanine instead. The signal sequence is underlined.

| (SEQ ID NO: 7) | |
|---|---|
| 1 | ATGACGGCGC CCTGGGTGGC CCTCGCCCTC CTCTGGGGAT CGCTGTGCGC |
| 51 | CGGCTCTGGG CGTGGGGAGG CTGAGACACG GGAGTGCATC TACTACAACG |
| 101 | CCAACTGGGA GCTGGAGCGC ACCAACCAGA GCGGCCTGGA GCGCTGCGAA |
| 151 | GGCGAGCAGG ACAAGCGGCT GCACTGCTAC GCCTCCTGGC GCAACAGCTC |
| 201 | TGGCACCATC GAGCTCGTGA AGAAGGGCTG CTGGCTAGAT GACTTCAACT |
| 251 | GCTACGATAG GCAGGAGTGT GTGGCCACTG AGGAGAACCC CCAGGTGTAC |
| 301 | TTCTGCTGCT GTGAAGGCAA CTTCTGCAAC GAACGCTTCA CTCATTTGCC |
| 351 | AGAGGCTGGG GGCCCGGAAG TCACGTACGA GCCACCCCCG ACAGCCCCCA |
| 401 | CCCTGCTCAC GGTGCTGGCC TACTCACTGC TGCCCATCGG GGGCCTTTCC |
| 451 | CTCATCGTCC TGCTGGCCTT TTGGATGTAC CGGCATCGCA AGCCCCCCTA |
| 501 | CGGTCATGTG GACATCCATG AGGACCCTGG GCCTCCACCA CCATCCCCTC |
| 551 | TGGTGGGCCT GAAGCCACTG CAGCTGCTGG AGATCAAGGC TCGGGGGCGC |
| 601 | TTTGGCTGTG TCTGGAAGGC CCAGCTCATG AATGACTTTG TAGCTGTCAA |
| 651 | GATCTTCCCA CTCCAGGACA AGCAGTCGTG GCAGAGTGAA CGGGAGATCT |
| 701 | TCAGCACACC TGGCATGAAG CACGAGAACC TGCTACAGTT CATTGCTGCC |
| 751 | GAGAAGCGAG GCTCCAACCT CGAAGTAGAG CTGTGGCTCA TCACGGCCTT |
| 801 | CCATGACAAG GGCTCCCTCA CGGATTACCT CAAGGGGAAC ATCATCACAT |
| 851 | GGAACGAACT GTGTCATGTA GCAGAGACGA TGTCACGAGG CCTCTCATAC |
| 901 | CTGCATGAGG ATGTGCCCTG GTGCCGTGGC GAGGGCCACA AGCCGTCTAT |
| 951 | TGCCCACAGG GACTTTAAAA GTAAGAATGT ATTGCTGAAG AGCGACCTCA |
| 1001 | CAGCCGTGCT GGCTGACTTT GGCTTGGCTG TTCGATTTGA GCCAGGGAAA |
| 1051 | CCTCCAGGGG ACACCCACGG ACAGGTAGGC ACGAGACGGT ACATGGCTCC |
| 1101 | TGAGGTGCTC GAGGGAGCCA TCAACTTCCA GAGAGATGCC TTCCTGCGCA |
| 1151 | TTGACATGTA TGCCATGGGG TTGGTGCTGT GGGAGCTTGT GTCTCGCTGC |
| 1201 | AAGGCTGCAG ACGGACCCGT GGATGAGTAC ATGCTGCCCT TTGAGGAAGA |
| 1251 | GATTGGCCAG CACCCTTCGT TGGAGGAGCT GCAGGAGGTG GTGGTGCACA |
| 1301 | AGAAGATGAG GCCCACCATT AAAGATCACT GGTTGAAACA CCCGGGCCTG |
| 1351 | GCCCAGCTTT GTGTGACCAT CGAGGAGTGC TGGGACCATG ATGCAGAGGC |
| 1401 | TCGCTTGTCC GCGGGCTGTG TGGAGGAGCG GGTGTCCCTG ATTCGGAGGT |
| 1451 | CGGTCAACGG CACTACCTCG GACTGTCTCG TTTCCCTGGT GACCTCTGTC |
| 1501 | ACCAATGTGG ACCTGCCCCC TAAAGAGTCA AGCATC |

[0307] A nucleic acid sequence encoding processed extracellular human ActRIIB polypeptide is as follows (SEQ ID NO: 8). The sequence as shown provides an arginine at position 64, and may be modified to provide an alanine instead.

| (SEQ ID NO: 8) | |
|---|---|
| 1 | GGGCGTGGGG AGGCTGAGAC ACGGGAGTGC ATCTACTACA ACGCCAACTG |
| 51 | GGAGCTGGAG CGCACCAACC AGAGCGGCCT GGAGCGCTGC GAAGGCGAGC |
| 101 | AGGACAAGCG GCTGCACTGC TACGCCTCCT GGCGCAACAG CTCTGGCACC |
| 151 | ATCGAGCTCG TGAAGAAGGG CTGCTGGCTA GATGACTTCA ACTGCTACGA |
| 201 | TAGGCAGGAG TGTGTGGCCA CTGAGGAGAA CCCCCAGGTG TACTTCTGCT |
| 251 | GCTGTGAAGG CAACTTCTGC AACGAACGCT TCACTCATTT GCCAGAGGCT |
| 301 | GGGGGCCCGG AAGTCACGTA CGAGCCACCC CCGACAGCCC CCACC |

[0308] An alignment of the amino acid sequences of human ActRIIB extracellular domain and human ActRIIA extracellular domain are illustrated in FIG. 3. This alignment indicates amino acid residues within both receptors that are believed to directly contact ActRII ligands. For example, the composite ActRII structures indicated that the ActRIIB-ligand binding pocket is defined, in part, by residues Y31, N33, N35, L38 through T41, E47, E50, Q53 through K55, L57, H58, Y60, S62, K74, W78 through N83, Y85, R87, A92, and E94 through F101. At these positions, it is expected that conservative mutations will be tolerated.

[0309] In addition, ActRIIB is well-conserved among vertebrates, with large stretches of the extracellular domain completely conserved. For example, FIG. 4 depicts a multi-sequence alignment of a human ActRIIB extracellular domain compared to various ActRIIB orthologs. Many of the ligands that bind to ActRIIB are also highly conserved. Accordingly, from these alignments, it is possible to predict key amino acid positions within the ligand-binding domain that are important for normal ActRIIB-ligand binding activities as well as to predict amino acid positions that are likely to be tolerant of substitution without significantly altering normal ActRIIB-ligand binding activities. Therefore, an active, human ActRIIB variant polypeptide useful in accordance with the presently disclosed methods may include one or more amino acids at corresponding positions from the sequence of another vertebrate ActRIIB, or may include a residue that is similar to that in the human or other vertebrate sequences. Without meaning to be limiting, the following examples illustrate this approach to defining an active ActRIIB variant. L46 in the human extracellular domain (SEQ ID NO: 2) is a valine in Xenopus ActRIIB and so this position may be altered, and optionally may be altered to another hydrophobic residue, such as V, I or F, or a non-polar residue such as A. E52 in the human extracellular domain is a K in Xenopus, indicating that this site may be tolerant of a wide variety of changes, including polar residues, such as E, D, K, R, H, S, T, P, G, Y and probably A. T93 in the human extracellular domain is a K in Xenopus, indicating that a wide structural variation is tolerated at this position, with polar residues favored, such as S, K, R, E, D, H, G, P, G and Y. F108 in the human extracellular domain is a Y in Xenopus, and therefore Y or other hydrophobic group, such as I, V or L should be tolerated. E111 in the human extracellular domain is K in Xenopus, indicating that charged residues will be tolerated at this position, including D, R, K and H, as well as Q and N. R112 in the human extracellular domain is K in Xenopus, indicating that basic residues are tolerated at this position, including R and H. A at position 119 in the human extracellular domain is relatively poorly conserved, and appears as P in rodents and V in Xenopus, thus essentially any amino acid should be tolerated at this position.

[0310] Moreover, ActRII proteins have been characterized in the art in terms of structural and functional characteristics, particularly with respect to ligand binding [Attisano et al. (1992) Cell 68(1):97-108; Greenwald et al. (1999) Nature Structural Biology 6(1): 18-22; Allendorph et al. (2006) PNAS 103(20: 7643-7648; Thompson et al. (2003) The EMBO Journal 22(7): 1555-1566; as well as U.S. Pat. Nos. 7,709,605, 7,612,041, and 7,842,663]. In addition to the teachings herein, these references provide amply guidance for how to generate ActRIIB variants that retain one or more normal activities (e.g., ligand-binding activity).

[0311] For example, a defining structural motif known as a three-finger toxin fold is important for ligand binding by type I and type II receptors and is formed by conserved cysteine residues located at varying positions within the extracellular domain of each monomeric receptor [Greenwald et al. (1999) Nat Struct Biol 6:18-22; and Hinck (2012) FEBS Lett 586:1860-1870]. Accordingly, the core ligand-binding domains of human ActRIIB, as demarcated by the outermost of these conserved cysteines, corresponds to positions 29-109 of SEQ ID NO: 1 (ActRIIB precursor). Thus, the structurally less-ordered amino acids flanking these cysteine-demarcated core sequences can be truncated by about 1, 2, 3, 4, 5, 6, 7, 8, 9, 10, 11, 12, 13, 14, 15, 16, 17, 18, 19, 20, 21, 22, 23, 24, 25, 26, 27, or 28 residues at the N-terminus and/or by about 1, 2, 3, 4, 5, 6, 7, 8, 9, 10, 11, 12, 13, 14, 15, 16, 17, 18, 19, 20, 21, 22, 23, 24, or 25 residues a the C-terminus without necessarily altering ligand binding. Exemplary ActRIIB extracellular domains for N-terminal and/or C-terminal truncation include SEQ ID NOs: 2, 3, 5, and 6.

[0312] Attisano et al. showed that a deletion of the proline knot at the C-terminus of the extracellular domain of ActRIIB reduced the affinity of the receptor for activin. An ActRIIB-Fc fusion protein containing amino acids 20-119 of present SEQ ID NO: 1, “ActRIIB(20-119)-Fc”, has reduced binding to GDF11 and activin relative to an ActRIIB(20-134)-Fc, which includes the proline knot region and the complete juxtamembrane domain (see, e.g., U.S. Pat. No. 7,842,663). However, an ActRIIB(20-129)-Fc protein retains similar, but somewhat reduced activity, relative to the wild-type, even though the proline knot region is disrupted.

[0313] Thus, ActRIIB extracellular domains that stop at amino acid 134, 133, 132, 131, 130 and 129 (with respect to SEQ ID NO: 1) are all expected to be active, but constructs stopping at 134 or 133 may be most active. Similarly, mutations at any of residues 129-134 (with respect to SEQ ID NO: 1) are not expected to alter ligand-binding affinity by large margins. In support of this, it is known in the art that mutations of P129 and P130 (with respect to SEQ ID NO: 1) do not substantially decrease ligand binding. Therefore, an ActRIIB polypeptide of the present disclosure may end as early as amino acid 109 (the final cysteine), however, forms ending at or between 109 and 119 (e.g., 109, 110, 111, 112, 113, 114, 115, 116, 117, 118, or 119) are expected to have reduced ligand binding. Amino acid 119 (with respect to present SEQ ID NO: 1) is poorly conserved and so is readily altered or truncated. ActRIIB polypeptides ending at 128 (with respect to SEQ ID NO: 1) or later should retain ligand-binding activity. ActRIIB polypeptides ending at or between 119 and 127 (e.g., 119, 120, 121, 122, 123, 124, 125, 126, or 127), with respect to SEQ ID NO: 1, will have an intermediate binding ability. Any of these forms may be desirable to use, depending on the clinical or experimental setting.

[0314] At the N-terminus of ActRIIB, it is expected that a protein beginning at amino acid 29 or before (with respect to SEQ ID NO: 1) will retain ligand-binding activity. Amino acid 29 represents the initial cysteine. An alanine-to-asparagine mutation at position 24 (with respect to SEQ ID NO: 1) introduces an N-linked glycosylation sequence without substantially affecting ligand binding [U.S. Pat. No. 7,842,663]. This confirms that mutations in the region between the signal cleavage peptide and the cysteine cross-linked region, corresponding to amino acids 20-29, are well tolerated. In particular, ActRIIB polypeptides beginning at position 20, 21, 22, 23, and 24 (with respect to SEQ ID NO: 1) should retain general ligand-biding activity, and ActRIIB polypeptides beginning at positions 25, 26, 27, 28, and 29 (with respect to SEQ ID NO: 1) are also expected to retain ligand-biding activity. It has been demonstrated, e.g., U.S. Pat. No. 7,842,663, that, surprisingly, an ActRIIB construct beginning at 22, 23, 24, or 25 will have the most activity.

[0315] Taken together, a general formula for an active portion (e.g., ligand-binding portion) of ActRIIB comprises amino acids 29-109 of SEQ ID NO: 1. Therefore ActRIIB polypeptides may, for example, comprise, consist essentially of, or consist of an amino acid sequence that is at least 70%, 75%, 80%, 85%, 86%, 87%, 88%, 89%, 90%, 91%, 92%, 93%, 94%, 95%, 96%, 97%, 98%, 99%, or 100% identical to a portion of ActRIIB beginning at a residue corresponding to any one of amino acids 20-29 (e.g., beginning at any one of amino acids 20, 21, 22, 23, 24, 25, 26, 27, 28, or 29) of SEQ ID NO: 1 and ending at a position corresponding to any one amino acids 109-134 (e.g., ending at any one of amino acids 109, 110, 111, 112, 113, 114, 115, 116, 117, 118, 119, 120, 121, 122, 123, 124, 125, 126, 127, 128, 129, 130, 131, 132, 133, or 134) of SEQ ID NO: 1. Other examples include polypeptides that begin at a position from 20-29 (e.g., any one of positions 20, 21, 22, 23, 24, 25, 26, 27, 28, or 29) or 21-29 (e.g., any one of positions 21, 22, 23, 24, 25, 26, 27, 28, or 29) of SEQ ID NO: 1 and end at a position from 119-134 (e.g., any one of positions 119, 120, 121, 122, 123, 124, 125, 126, 127, 128, 129, 130, 131, 132, 133, or 134), 119-133 (e.g., any one of positions 119, 120, 121, 122, 123, 124, 125, 126, 127, 128, 129, 130, 131, 132, or 133), 129-134 (e.g., any one of positions 129, 130, 131, 132, 133, or 134), or 129-133 (e.g., any one of positions 129, 130, 131, 132, or 133) of SEQ ID NO: 1. Other examples include constructs that begin at a position from 20-24 (e.g., any one of positions 20, 21, 22, 23, or 24), 21-24 (e.g., any one of positions 21, 22, 23, or 24), or 22-25 (e.g., any one of positions 22, 22, 23, or 25) of SEQ ID NO: 1 and end at a position from 109-134 (e.g., any one of positions 109, 110, 111, 112, 113, 114, 115, 116, 117, 118, 119, 120, 121, 122, 123, 124, 125, 126, 127, 128, 129, 130, 131, 132, 133, or 134), 119-134 (e.g., any one of positions 119, 120, 121, 122, 123, 124, 125, 126, 127, 128, 129, 130, 131, 132, 133, or 134) or 129-134 (e.g., any one of positions 129, 130, 131, 132, 133, or 134) of SEQ ID NO: 1. Variants within these ranges are also contemplated, particularly those having at least 70%, 75%, 80%, 85%, 86%, 87%, 88%, 89%, 90%, 91%, 92%, 93%, 94%, 95%, 96%, 97%, 98%, 99%, or 100% identity to the corresponding portion of SEQ ID NO: 1.

[0316] The variations described herein may be combined in various ways. In some embodiments, ActRIIB variants comprise no more than 1, 2, 5, 6, 7, 8, 9, 10 or 15 conservative amino acid changes in the ligand-binding pocket, and zero, one, or more non-conservative alterations at positions 40, 53, 55, 74, 79 and/or 82 in the ligand-binding pocket. Sites outside the binding pocket, at which variability may be particularly well tolerated, include the amino and carboxy termini of the extracellular domain (as noted above), and positions 42-46 and 65-73 (with respect to SEQ ID NO: 1). An asparagine-to-alanine alteration at position 65 (N65A) actually improves ligand binding in the A64 background, and is thus expected to have no detrimental effect on ligand binding in the R64 background [U.S. Pat. No. 7,842,663]. This change probably eliminates glycosylation at N65 in the A64 background, thus demonstrating that a significant change in this region is likely to be tolerated. While an R64A change is poorly tolerated, R64K is well-tolerated, and thus another basic residue, such as H may be tolerated at position 64 [U.S. Pat. No. 7,842,663]. Additionally, the results of the mutagenesis program described in the art indicate that there are amino acid positions in ActRIIB that are often beneficial to conserve. With respect to SEQ ID NO: 1, these include position 80 (acidic or hydrophobic amino acid), position 78 (hydrophobic, and particularly tryptophan), position 37 (acidic, and particularly aspartic or glutamic acid), position 56 (basic amino acid), position 60 (hydrophobic amino acid, particularly phenylalanine or tyrosine). Thus, the disclosure provides a framework of amino acids that may be conserved in ActRIIB polypeptides. Other positions that may be desirable to conserve are as follows: position 52 (acidic amino acid), position 55 (basic amino acid), position 81 (acidic), 98 (polar or charged, particularly E, D, R or K), all with respect to SEQ ID NO: 1.

[0317] In certain embodiments, the disclosure relates to heteromultimers that comprise at least one ActRIIB polypeptide, which includes fragments, functional variants, and modified forms thereof. Preferably, ActRIIB polypeptides for use in accordance with the disclosure are soluble (e.g., an extracellular domain of ActRIIB). In other preferred embodiments, ActRIIB polypeptides for use in accordance with the disclosure bind to one or more TGF-beta superfamily ligands. Therefore, in some embodiments, ActRIIB polypeptides for use in accordance with the disclosure inhibit (antagonize) activity (e.g., Smad signaling) of one or more TGF-beta superfamily ligands. In some embodiments, heteromultimers of the disclosure comprise at least one ActRIIB polypeptide that comprises an amino acid sequence that is at least 70%, 75%, 80%, 85%, 86%, 87%, 88%, 89%, 90%, 91%, 92%, 93%, 94%, 95%, 96%, 97%, 98%, 99%, or 100% identical to a portion of ActRIIB beginning at a residue corresponding to amino acids 20-29 (e.g., beginning at any one of amino acids 20, 21, 22, 23, 24, 25, 26, 27, 28, or 29) of SEQ ID NO: 1 and ending at a position corresponding to amino acids 109-134 (e.g., ending at any one of amino acids 109, 110, 111, 112, 113, 114, 115, 116, 117, 118, 119, 120, 121, 122, 123, 124, 125, 126, 127, 128, 129, 130, 131, 132, 133, or 134) of SEQ ID NO: 1. In certain preferred embodiments, heteromultimers of the disclosure comprise at least one ActRIIB polypeptide that comprises amino acid sequence that is at least 70%, 75%, 80%, 85%, 86%, 87%, 88%, 89%, 90%, 91%, 92%, 93%, 94%, 95%, 96%, 97%, 98%, 99%, or 100% identical amino acids 29-109 of SEQ ID NO: 1 In other preferred embodiments, heteromultimers of the disclosure comprise at least one ActRIIB polypeptide that comprises an amino acid sequence that is at least 70%, 75%, 80%, 85%, 86%, 87%, 88%, 89%, 90%, 91%, 92%, 93%, 94%, 95%, 96%, 97%, 98%, 99%, or 100% identical amino acids 25-131 of SEQ ID NO: 1 In some embodiments, heteromultimers of the disclosure comprise at least one ActRIIB polypeptide that is at least 70%, 75%, 80%, 85%, 86%, 87%, 88%, 89%, 90%, 91%, 92%, 93%, 94%, 95%, 97%, 98%, 99%, or 100% identical to the amino acid sequence of any one of SEQ ID NOs: 1, 2, 3, 4, 5, and 6. In certain embodiments, heteromultimers of the disclosure comprise at least one ActRIIB polypeptide wherein the amino acid position corresponding to L79 of SEQ ID NO: 1 is not an acidic amino acid (i.e., is not a naturally occurring D or E amino acid residue or artificial acidic amino acid).

[0318] In certain embodiments, the present disclosure relates to a protein complex comprising an ActRIIA polypeptide. As used herein, the term “ActRIIA” refers to a family of activin receptor type IIA (ActRIIA) proteins from any species and variants derived from such ActRIIA proteins by mutagenesis or other modification. Reference to ActRIIA herein is understood to be a reference to any one of the currently identified forms. Members of the ActRIIA family are generally transmembrane proteins, composed of a ligand-binding extracellular domain comprising a cysteine-rich region, a transmembrane domain, and a cytoplasmic domain with predicted serine/threonine kinase activity.

[0319] The term “ActRIIA polypeptide” includes polypeptides comprising any naturally occurring polypeptide of an ActRIIA family member as well as any variants thereof (including mutants, fragments, fusions, and peptidomimetic forms) that retain a useful activity. Examples of such variant ActRIIA polypeptides are provided throughout the present disclosure as well as in International Patent Application Publication No. WO 2006/012627, which is incorporated herein by reference in its entirety.

[0320] The human ActRIIA precursor protein sequence is as follows:

| (SEQ ID NO: 9) | |
|---|---|
| 1 | MGAAAKLAFA VFLISCSSGA ILGRSETQEC LFFNANWEKD RTNQTGVEPC |
| 51 | YGDKDKRRHC FATWKNISGS IEIVKQGCWL DDINCYDRTD CVEKKDSPEV |
| 101 | YFCCCEGNMC NEKFSYFPEM EVTQPTSNPV TPKPPYYNIL LYSLVPLMLI |
| 151 | AGIVICAFWV YRHHKMAYPP VLVPTQDPGP PPPSPLLGLK PLQLLEVKAR |
| 201 | GRFGCVWKAQ LLNEYVAVKI FPIQDKQSWQ NEYEVYSLPG MKHENILQFI |
| 251 | GAEKRGTSVD VDLWLITAFH EKGSLSDFLK ANVVSWNELC HIAETMARGL |
| 301 | AYLHEDIPGL KDGHKPAISH RDIKSKNVLL KNNLTACIAD FGLALKFEAG |
| 351 | KSAGDTHGQV GTRRYMAPEV LEGAINFQRD AFLRIDMYAM GLVLWELASR |
| 401 | CTAADGPVDE YMLPFEEEIG QHPSLEDMQE VVVHKKKRPV LRDYWQKHAG |
| 451 | MAMLCETIEE CWDHDAEARL SAGCVGERIT QMQRLTNIIT TEDIVTVVTM |
| 501 | VTNVDFPPKE SSL |

[0321] The signal peptide is indicated by a single underline; the extracellular domain is indicated in bold font; and the potential, endogenous N-linked glycosylation sites are indicated by a double underline.

[0322] A processed extracellular human ActRIIA polypeptide sequence is as follows:

(SEQ ID NO: 10)

ILGRSETQECLFFNANWEKDRTNQTGVEPCYGDKDKRRHCFATWKNISGS
IEIVKQGCWLDDINCYDRTDCVEKKDSPEVYFCCCEGNMCNEKFSYFPEM
EVTQPTSNPVTPKPP

[0323] The C-terminal “tail” of the extracellular domain is indicated by a single underline. The sequence with the “tail” deleted (a 415 sequence) is as follows:

(SEQ ID NO: 11)

ILGRSETQECLFFNANWEKDRTNQTGVEPCYGDKDKRRHCFATWKNISGS
IEIVKQGCWLDDINCYDRTDCVEKKDSPEVYFCCCEGNMCNEKFSYFPEM

[0324] A nucleic acid sequence encoding the human ActRIIA precursor protein is shown below (SEQ ID NO: 12), corresponding to nucleotides 159-1700 of Genbank Reference Sequence NM_001616.4. The signal sequence is underlined.

| (SEQ ID NO: 12) | |
|---|---|
| 1 | ATGGGAGCTG CTGCAAAGTT GGCGTTTGCC GTCTTTCTTA TCTCCTGTTC |
| 51 | TTCAGGTGCT ATACTTGGTA GATCAGAAAC TCAGGAGTGT CTTTTCTTTA |
| 101 | ATGCTAATTG GGAAAAAGAC AGAACCAATC AAACTGGTGT TGAACCGTGT |
| 151 | TATGGTGACA AAGATAAACG GCGGCATTGT TTTGCTACCT GGAAGAATAT |
| 201 | TTCTGGTTCC ATTGAAATAG TGAAACAAGG TTGTTGGCTG GATGATATCA |
| 251 | ACTGCTATGA CAGGACTGAT TGTGTAGAAA AAAAAGACAG CCCTGAAGTA |
| 301 | TATTTTTGTT GCTGTGAGGG CAATATGTGT AATGAAAAGT TTTCTTATTT |
| 351 | TCCGGAGATG GAAGTCACAC AGCCCACTTC AAATCCAGTT ACACCTAAGC |
| 401 | CACCCTATTA CAACATCCTG CTCTATTCCT TGGTGCCACT TATGTTAATT |
| 451 | GCGGGGATTG TCATTTGTGC ATTTTGGGTG TACAGGCATC ACAAGATGGC |
| 501 | CTACCCTCCT GTACTTGTTC CAACTCAAGA CCCAGGACCA CCCCCACCTT |
| 551 | CTCCATTACT AGGTTTGAAA CCACTGCAGT TATTAGAAGT GAAAGCAAGG |
| 601 | GGAAGATTTG GTTGTGTCTG GAAAGCCCAG TTGCTTAACG AATATGTGGC |
| 651 | TGTCAAAATA TTTCCAATAC AGGACAAACA GTCATGGCAA AATGAATACG |
| 701 | AAGTCTACAG TTTGCCTGGA ATGAAGCATG AGAACATATT ACAGTTCATT |
| 751 | GGTGCAGAAA AACGAGGCAC CAGTGTTGAT GTGGATCTTT GGCTGATCAC |
| 801 | AGCATTTCAT GAAAAGGGTT CACTATCAGA CTTTCTTAAG GCTAATGTGG |
| 851 | TCTCTTGGAA TGAACTGTGT CATATTGCAG AAACCATGGC TAGAGGATTG |
| 901 | GCATATTTAC ATGAGGATAT ACCTGGCCTA AAAGATGGCC ACAAACCTGC |
| 951 | CATATCTCAC AGGGACATCA AAAGTAAAAA TGTGCTGTTG AAAAACAACC |
| 1001 | TGACAGCTTG CATTGCTGAC TTTGGGTTGG CCTTAAAATT TGAGGCTGGC |
| 1051 | AAGTCTGCAG GCGATACCCA TGGACAGGTT GGTACCCGGA GGTACATGGC |
| 1101 | TCCAGAGGTA TTAGAGGGTG CTATAAACTT CCAAAGGGAT GCATTTTTGA |
| 1151 | GGATAGATAT GTATGCCATG GGATTAGTCC TATGGGAACT GGCTTCTCGC |
| 1201 | TGTACTGCTG CAGATGGACC TGTAGATGAA TACATGTTGC CATTTGAGGA |
| 1251 | GGAAATTGGC CAGCATCCAT CTCTTGAAGA CATGCAGGAA GTTGTTGTGC |
| 1301 | ATAAAAAAAA GAGGCCTGTT TTAAGAGATT ATTGGCAGAA ACATGCTGGA |
| 1351 | ATGGCAATGC TCTGTGAAAC CATTGAAGAA TGTTGGGATC ACGACGCAGA |
| 1401 | AGCCAGGTTA TCAGCTGGAT GTGTAGGTGA AAGAATTACC CAGATGCAGA |
| 1451 | GACTAACAAA TATTATTACC ACAGAGGACA TTGTAACAGT GGTCACAATG |
| 1501 | GTGACAAATG TTGACTTTCC TCCCAAAGAA TCTAGTCTA |

[0325] A nucleic acid sequence encoding a processed extracellular ActRIIA polypeptide is as follows:

| (SEQ ID NO: 13) | |
|---|---|
| 1 | ATACTTGGTA GATCAGAAAC TCAGGAGTGT CTTTTCTTTA ATGCTAATTG |
| 51 | GGAAAAAGAC AGAACCAATC AAACTGGTGT TGAACCGTGT TATGGTGACA |
| 101 | AAGATAAACG GCGGCATTGT TTTGCTACCT GGAAGAATAT TTCTGGTTCC |
| 151 | ATTGAAATAG TGAAACAAGG TTGTTGGCTG GATGATATCA ACTGCTATGA |
| 201 | CAGGACTGAT TGTGTAGAAA AAAAAGACAG CCCTGAAGTA TATTTTTGTT |
| 251 | GCTGTGAGGG CAATATGTGT AATGAAAAGT TTTCTTATTT TCCGGAGATG |
| 301 | GAAGTCACAC AGCCCACTTC AAATCCAGTT ACACCTAAGC CACCC |

[0326] A general formula for an active (e.g., ligand binding) ActRIIA polypeptide is one that comprises a polypeptide that starts at amino acid 30 and ends at amino acid 110 of SEQ ID NO: 9. Accordingly, ActRIIA polypeptides of the present disclosure may comprise a polypeptide that is at least 70%, 75%, 80%, 85%, 86%, 87%, 88%, 89%, 90%, 91%, 92%, 93%, 94%, 95%, 97%, 98%, 99%, or 100% identical to amino acids 30-110 of SEQ ID NO: 9. Optionally, ActRIIA polypeptides of the present disclosure comprise a polypeptide that is at least 70%, 75%, 80%, 85%, 86%, 87%, 88%, 89%, 90%, 91%, 92%, 93%, 94%, 95%, 97%, 98%, 99%, or 100% identical to amino acids 12-82 of SEQ ID NO: 9 optionally beginning at a position ranging from 1-5 (e.g., 1, 2, 3, 4, or 5) or 3-5 (e.g., 3, 4, or 5) and ending at a position ranging from 110-116 (e.g., 110, 111, 112, 113, 114, 115, or 116) or 110-115 (e.g., 110, 111, 112, 113, 114, or 115), respectively, and comprising no more than 1, 2, 5, 10 or 15 conservative amino acid changes in the ligand binding pocket, and zero, one or more non-conservative alterations at positions 40, 53, 55, 74, 79 and/or 82 in the ligand-binding pocket with respect to SEQ ID NO: 9.

[0327] In certain embodiments, the disclosure relates to heteromultimers that comprise at least one ActRIIA polypeptide, which includes fragments, functional variants, and modified forms thereof. Preferably, ActRIIA polypeptides for use in accordance with the disclosure (e.g., heteromultimer complexes comprising an ActRIIA polypeptide and uses thereof) are soluble (e.g., an extracellular domain of ActRIIA). In other preferred embodiments, ActRIIA polypeptides for use in accordance with the disclosure bind to and/or inhibit (antagonize) activity (e.g., Smad signaling) of one or more TGF-beta superfamily ligands. In some embodiments, heteromultimers of the disclosure comprise at least one ActRIIA polypeptide that is at least 70%, 75%, 80%, 85%, 86%, 87%, 88%, 89%, 90%, 91%, 92%, 93%, 94%, 95%, 97%, 98%, 99%, or 100% identical to the amino acid sequence of any one of SEQ ID NOs: 9, 10, and 11. In some embodiments, heteromultimers of the disclosure comprise at least one ActRIIA polypeptide that is at least 70%, 75%, 80%, 85%, 90%, 91%, 92%, 93%, 94%, 95%, 96%, 97%, 98%, 99%, or 100% identical to a polypeptide that begins at any one of amino acids of 21-30 (e.g., amino acid residues 21, 22, 23, 24, 25, 26, 27, 28, 29, or 30) of SEQ ID NO: 9, and ends at any one of amino acids 110-135 (e.g., amino acid residues 110, 111, 112, 113, 114, 115, 116, 117, 118, 119, 120, 121, 122, 123, 124, 125, 126, 127, 128, 129, 130, 131, 132, 133, 134, or 135) of SEQ ID NO: 9. In some embodiments, heteromultimers of the disclosure comprise at least one endoglin polypeptide that is at least 70%, 75%, 80%, 85%, 90%, 91%, 92%, 93%, 94%, 95%, 96%, 97%, 98%, 99%, or 100% identical to amino acids of 21-110 of SEQ ID NO: 9. In some embodiments, heteromultimers of the disclosure comprise at least one endoglin polypeptide that is at least 70%, 75%, 80%, 85%, 90%, 91%, 92%, 93%, 94%, 95%, 96%, 97%, 98%, 99%, or 100% identical to amino acids of 21-135 of SEQ ID NO: 9. In some embodiments, heteromultimers of the disclosure comprise at least one endoglin polypeptide that is at least 70%, 75%, 80%, 85%, 90%, 91%, 92%, 93%, 94%, 95%, 96%, 97%, 98%, 99%, or 100% identical to amino acids of 30-110 of SEQ ID NO: 9. In some embodiments, heteromultimers of the disclosure comprise at least one endoglin polypeptide that is at least 70%, 75%, 80%, 85%, 90%, 91%, 92%, 93%, 94%, 95%, 96%, 97%, 98%, 99%, or 100% identical to amino acids of 30-135 of SEQ ID NO: 9.

[0328] In certain aspects, the present disclosure relates to heteromultimers that comprise a TGFBRII polypeptide. As used herein, the term “TGFBRII” refers to a family of transforming growth factor-beta receptor II (TGFBRII) proteins from any species and variants derived from such proteins by mutagenesis or other modification. Reference to TGFBRII herein is understood to be a reference to any one of the currently identified forms. Members of the TGFBRII family are generally transmembrane proteins, composed of a ligand-binding extracellular domain with a cysteine-rich region, a transmembrane domain, and a cytoplasmic domain with predicted serine/threonine kinase activity.

[0329] The term “TGFBRII polypeptide” includes polypeptides comprising any naturally occurring polypeptide of a TGFBRII family member as well as any variants thereof (including mutants, fragments, fusions, and peptidomimetic forms) that retain a useful activity.

[0330] A human TGFBRII precursor protein sequence (NCBI Ref Seq NP_003233.4) is as follows:

| (SEQ ID NO: 42) | |
|---|---|
| 1 | MGRGLLRGLW PLHIVLWTRI ASTIPPHVQK SVNNDMIVTD NNGAVKFPQL |
| 51 | CKFCDVRFST CDNQKSCMSN CSITSICEKP QEVCVAVWRK NDENITLETV |
| 101 | CHDPKLPYHD FILEDAASPK CIMKEKKKPG ETFFMCSCSS DECNDNIIFS |
| 151 | EEYNTSNPDL LLVIFQVTGI SLLPPLGVAI SVIIIFYCYR VNRQQKLSST |
| 201 | WETGKTRKLM EFSEHCAIIL EDDRSDISST CANNINHNTE LLPIELDTLV |
| 251 | GKGRFAEVYK AKLKQNTSEQ FETVAVKIFP YEEYASWKTE KDIFSDINLK |
| 301 | HENILQFLTA EERKTELGKQ YWLITAFHAK GNLQEYLTRH VISWEDLRKL |
| 351 | GSSLARGIAH LHSDHTPCGR PKMPIVHRDL KSSNILVKND LTCCLCDFGL |
| 401 | SLRLDPTLSV DDLANSGQVG TARYMAPEVL ESRMNLENVE SFKQTDVYSM |
| 451 | ALVLWEMTSR CNAVGEVKDY EPPFGSKVRE HPCVESMKDN VLRDRGRPEI |
| 501 | PSFWLNHQGI QMVCETLTEC WDHDPEARLT AQCVAERFSE LEHLDRLSGR |
| 551 | SCSEEKIPED GSLNTTK |

[0331] The signal peptide is indicated by a single underline and the extracellular domain is indicated in bold font.

[0332] A processed extracellular TGFBRII polypeptide sequence is as follows:

(SEQ ID NO: 43)

TIPPHVQKSVNNDMIVTDNNGAVKFPQLCKFCDVRFSTCDNQKSCMSNCS
ITSICEKPQEVCVAVWRKNDENITLETVCHDPKLPYHDFILEDAASPKCI
MKEKKKPGETFFMCSCSSDECNDNIIFSEEYNTSNPDLLLVIFQ

[0333] A nucleic acid sequence encoding TGFBRII precursor protein is shown below (SEQ ID NO: 44), corresponding to nucleotides 383-2083 of Genbank Reference Sequence NM_003242.5. The signal sequence is underlined.

(SEQ ID NO: 44)

ATGGGTCGGGGGCTGCTCAGGGGCCTGTGGCCGCTGCACATCGTCCTGTG
GACGCGTATCGCCAGCACGATCCCACCGCACGTTCAGAAGTCGGTTAATA
ACGACATGATAGTCACTGACAACAACGGTGCAGTCAAGTTTCCACAACTG
TGTAAATTTTGTGATGTGAGATTTTCCACCTGTGACAACCAGAAATCCTG
CATGAGCAACTGCAGCATCACCTCCATCTGTGAGAAGCCACAGGAAGTCT
GTGTGGCTGTATGGAGAAAGAATGACGAGAACATAACACTAGAGACAGTT
TGCCATGACCCCAAGCTCCCCTACCATGACTTTATTCTGGAAGATGCTGC
TTCTCCAAAGTGCATTATGAAGGAAAAAAAAAAGCCTGGTGAGACTTTCT
TCATGTGTTCCTGTAGCTCTGATGAGTGCAATGACAACATCATCTTCTCA
GAAGAATATAACACCAGCAATCCTGACTTGTTGCTAGTCATATTTCAAGT
GACAGGCATCAGCCTCCTGCCACCACTGGGAGTTGCCATATCTGTCATCA
TCATCTTCTACTGCTACCGCGTTAACCGGCAGCAGAAGCTGAGTTCAACC
TGGGAAACCGGCAAGACGCGGAAGCTCATGGAGTTCAGCGAGCACTGTGC
CATCATCCTGGAAGATGACCGCTCTGACATCAGCTCCACGTGTGCCAACA
ACATCAACCACAACACAGAGCTGCTGCCCATTGAGCTGGACACCCTGGTG
GGGAAAGGTCGCTTTGCTGAGGTCTATAAGGCCAAGCTGAAGCAGAACAC
TTCAGAGCAGTTTGAGACAGTGGCAGTCAAGATCTTTCCCTATGAGGAGT
ATGCCTCTTGGAAGACAGAGAAGGACATCTTCTCAGACATCAATCTGAAG
CATGAGAACATACTCCAGTTCCTGACGGCTGAGGAGCGGAAGACGGAGTT
GGGGAAACAATACTGGCTGATCACCGCCTTCCACGCCAAGGGCAACCTAC
AGGAGTACCTGACGCGGCATGTCATCAGCTGGGAGGACCTGCGCAAGCTG
GGCAGCTCCCTCGCCCGGGGGATTGCTCACCTCCACAGTGATCACACTCC
ATGTGGGAGGCCCAAGATGCCCATCGTGCACAGGGACCTCAAGAGCTCCA
ATATCCTCGTGAAGAACGACCTAACCTGCTGCCTGTGTGACTTTGGGCTT
TCCCTGCGTCTGGACCCTACTCTGTCTGTGGATGACCTGGCTAACAGTGG
GCAGGTGGGAACTGCAAGATACATGGCTCCAGAAGTCCTAGAATCCAGGA
TGAATTTGGAGAATGTTGAGTCCTTCAAGCAGACCGATGTCTACTCCATG
GCTCTGGTGCTCTGGGAAATGACATCTCGCTGTAATGCAGTGGGAGAAGT
AAAAGATTATGAGCCTCCATTTGGTTCCAAGGTGCGGGAGCACCCCTGTG
TCGAAAGCATGAAGGACAACGTGTTGAGAGATCGAGGGCGACCAGAAATT
CCCAGCTTCTGGCTCAACCACCAGGGCATCCAGATGGTGTGTGAGACGTT
GACTGAGTGCTGGGACCACGACCCAGAGGCCCGTCTCACAGCCCAGTGTG
TGGCAGAACGCTTCAGTGAGCTGGAGCATCTGGACAGGCTCTCGGGGAGG
AGCTGCTCGGAGGAGAAGATTCCTGAAGACGGCTCCCTAAACACTACCAA
A

[0334] A nucleic acid sequence encoding a processed extracellular TGFBRII polypeptide is as follows:

(SEQ ID NO: 45)

ACGATCCCACCGCACGTTCAGAAGTCGGTTAATAACGACATGATAGTCAC
TGACAACAACGGTGCAGTCAAGTTTCCACAACTGTGTAAATTTTGTGATG
TGAGATTTTCCACCTGTGACAACCAGAAATCCTGCATGAGCAACTGCAGC
ATCACCTCCATCTGTGAGAAGCCACAGGAAGTCTGTGTGGCTGTATGGAG
AAAGAATGACGAGAACATAACACTAGAGACAGTTTGCCATGACCCCAAGC
TCCCCTACCATGACTTTATTCTGGAAGATGCTGCTTCTCCAAAGTGCATT
ATGAAGGAAAAAAAAAAGCCTGGTGAGACTTTCTTCATGTGTTCCTGTAG
CTCTGATGAGTGCAATGACAACATCATCTTCTCAGAAGAATATAACACCA
GCAATCCTGACTTGTTGCTAGTCATATTTCAA

[0335] An alternative isoform of TGFBRII, isoform A (NP_001020018.1), is as follows:

| (SEQ ID NO: 67) | |
|---|---|
| 1 | MGRGLLRGLW PLHIVLWTRI ASTIPPHVQK SDVEMEAQKD EIICPSCNRT |
| 51 | AHPLRHINND MIVTDNNGAV KFPQLCKFCD VRFSTCDNQK SCMSNCSITS |
| 101 | ICEKPQEVCV AVWRKNDENI TLETVCHDPK LPYHDFILED AASPKCIMKE |
| 151 | KKKPGETFFM CSCSSDECND NIIFSEEYNT SNPDLLLVIF QVTGISLLPP |
| 201 | LGVAISVIII FYCYRVNRQQ KLSSTWETGK TRKLMEFSEH CAIILEDDRS |
| 251 | DISSTCANNI NHNTELLPIE LDTLVGKGRF AEVYKAKLKQ NTSEQFETVA |
| 301 | VKIFPYEEYA SWKTEKDIFS DINLKHENIL QFLTAEERKT ELGKQYWLIT |
| 351 | AFHAKGNLQE YLTRHVISWE DLRKLGSSLA RGIAHLHSDH TPCGRPKMPI |
| 401 | VHRDLKSSNI LVKNDLTCCL CDFGLSLRLD PTLSVDDLAN SGQVGTARYM |
| 451 | APEVLESRMN LENVESFKQT DVYSMALVLW EMTSRCNAVG EVKDYEPPFG |
| 501 | SKVREHPCVE SMKDNVLRDR GRPEIPSFWL NHQGIQMVCE TLTECWDHDP |
| 551 | EARLTAQCVA ERFSELEHLD RLSGRSCSEE KIPEDGSLNT TK |

[0336] The signal peptide is indicated by a single underline and the extracellular domain is indicated in bold font.

[0337] A processed extracellular TGFBRII polypeptide sequence (isoform A) is as follows:

(SEQ ID NO: 68)

TIPPHVQKSDVEMEAQKDEIICPSCNRTAHPLRHINNDMIVTDNNGAVKF
PQLCKFCDVRFSTCDNQKSCMSNCSITSICEKPQEVCVAVWRKNDENITL
ETVCHDPKLPYHDFILEDAASPKCIMKEKKKPGETFFMCSCSSDECNDNI
IFSEEYNTSNPDLLLVIFQ

[0338] A nucleic acid sequence encoding the TGFBRII precursor protein (isoform A) is shown below (SEQ ID NO: 69), corresponding to nucleotides 383-2158 of Genbank Reference Sequence NM_001024847.2. The signal sequence is underlined.

(SEQ ID NO: 69)

ATGGGTCGGGGGCTGCTCAGGGGCCTGTGGCCGCTGCACATCGTCCTGTG
GACGCGTATCGCCAGCACGATCCCACCGCACGTTCAGAAGTCGGATGTGG
AAATGGAGGCCCAGAAAGATGAAATCATCTGCCCCAGCTGTAATAGGACT
GCCCATCCACTGAGACATATTAATAACGACATGATAGTCACTGACAACAA
CGGTGCAGTCAAGTTTCCACAACTGTGTAAATTTTGTGATGTGAGATTTT
CCACCTGTGACAACCAGAAATCCTGCATGAGCAACTGCAGCATCACCTCC
ATCTGTGAGAAGCCACAGGAAGTCTGTGTGGCTGTATGGAGAAAGAATGA
CGAGAACATAACACTAGAGACAGTTTGCCATGACCCCAAGCTCCCCTACC
ATGACTTTATTCTGGAAGATGCTGCTTCTCCAAAGTGCATTATGAAGGAA
AAAAAAAAGCCTGGTGAGACTTTCTTCATGTGTTCCTGTAGCTCTGATGA
GTGCAATGACAACATCATCTTCTCAGAAGAATATAACACCAGCAATCCTG
ACTTGTTGCTAGTCATATTTCAAGTGACAGGCATCAGCCTCCTGCCACCA
CTGGGAGTTGCCATATCTGTCATCATCATCTTCTACTGCTACCGCGTTAA
CCGGCAGCAGAAGCTGAGTTCAACCTGGGAAACCGGCAAGACGCGGAAGC
TCATGGAGTTCAGCGAGCACTGTGCCATCATCCTGGAAGATGACCGCTCT
GACATCAGCTCCACGTGTGCCAACAACATCAACCACAACACAGAGCTGCT
GCCCATTGAGCTGGACACCCTGGTGGGGAAAGGTCGCTTTGCTGAGGTCT
ATAAGGCCAAGCTGAAGCAGAACACTTCAGAGCAGTTTGAGACAGTGGCA
GTCAAGATCTTTCCCTATGAGGAGTATGCCTCTTGGAAGACAGAGAAGGA
CATCTTCTCAGACATCAATCTGAAGCATGAGAACATACTCCAGTTCCTGA
CGGCTGAGGAGCGGAAGACGGAGTTGGGGAAACAATACTGGCTGATCACC
GCCTTCCACGCCAAGGGCAACCTACAGGAGTACCTGACGCGGCATGTCAT
CAGCTGGGAGGACCTGCGCAAGCTGGGCAGCTCCCTCGCCCGGGGGATTG
CTCACCTCCACAGTGATCACACTCCATGTGGGAGGCCCAAGATGCCCATC
GTGCACAGGGACCTCAAGAGCTCCAATATCCTCGTGAAGAACGACCTAAC
CTGCTGCCTGTGTGACTTTGGGCTTTCCCTGCGTCTGGACCCTACTCTGT
CTGTGGATGACCTGGCTAACAGTGGGCAGGTGGGAACTGCAAGATACATG
GCTCCAGAAGTCCTAGAATCCAGGATGAATTTGGAGAATGTTGAGTCCTT
CAAGCAGACCGATGTCTACTCCATGGCTCTGGTGCTCTGGGAAATGACAT
CTCGCTGTAATGCAGTGGGAGAAGTAAAAGATTATGAGCCTCCATTTGGT
TCCAAGGTGCGGGAGCACCCCTGTGTCGAAAGCATGAAGGACAACGTGTT
GAGAGATCGAGGGCGACCAGAAATTCCCAGCTTCTGGCTCAACCACCAGG
GCATCCAGATGGTGTGTGAGACGTTGACTGAGTGCTGGGACCACGACCCA
GAGGCCCGTCTCACAGCCCAGTGTGTGGCAGAACGCTTCAGTGAGCTGGA
GCATCTGGACAGGCTCTCGGGGAGGAGCTGCTCGGAGGAGAAGATTCCTG
AAGACGGCTCCCTAAACACTACCAAA

[0339] A nucleic acid sequence encoding an processed extracellular TGFBRII polypeptide (isoform A) is as follows:

(SEQ ID NO: 70)

ACGATCCCACCGCACGTTCAGAAGTCGGATGTGGAAATGGAGGCCCAGAA
AGATGAAATCATCTGCCCCAGCTGTAATAGGACTGCCCATCCACTGAGAC
ATATTAATAACGACATGATAGTCACTGACAACAACGGTGCAGTCAAGTTT
CCACAACTGTGTAAATTTTGTGATGTGAGATTTTCCACCTGTGACAACCA
GAAATCCTGCATGAGCAACTGCAGCATCACCTCCATCTGTGAGAAGCCAC
AGGAAGTCTGTGTGGCTGTATGGAGAAAGAATGACGAGAACATAACACTA
GAGACAGTTTGCCATGACCCCAAGCTCCCCTACCATGACTTTATTCTGGA
AGATGCTGCTTCTCCAAAGTGCATTATGAAGGAAAAAAAAAAGCCTGGTG
AGACTTTCTTCATGTGTTCCTGTAGCTCTGATGAGTGCAATGACAACATC
ATCTTCTCAGAAGAATATAACACCAGCAATCCTGACTTGTTGCTAGTCAT
ATTTCAA.

[0340] Either of the foregoing TGFBRII isoforms (SEQ ID NOs: 42, 43, 67, and 68) could incorporate an insertion of 36 amino acids (SEQ ID NO: 95) between the pair of glutamate residues (positions 151 and 152 of SEQ ID NO: 42; positions 129 and 130 of SEQ ID NO: 43; positions 176 and 177 of SEQ ID NO: 67; or positions 154 and 155 of SEQ ID NO: 68) located near the C-terminus of the TGFBRII ECD, as occurs naturally in the TGFBRII isoform C (Konrad et al., BMC Genomics 8:318, 2007).

(SEQ ID NO: 95)

GRCKIRHIGS NNRLQRSTCQ NTGWESAHVM KTPGFR

[0341] In certain embodiments, the disclosure relates to heteromultimers that comprise at least one TGFBRII polypeptide, which includes fragments, functional variants, and modified forms thereof. Preferably, TGFBRII polypeptides for use in accordance with the disclosure (e.g., heteromultimers comprising a TGFBRII polypeptide and uses thereof) are soluble (e.g., an extracellular domain of TGFBRII). In other preferred embodiments, TGFBRII polypeptides for use in accordance with the disclosure bind to and/or inhibit (antagonize) activity (e.g., Smad signaling) of one or more TGF-beta superfamily ligands. In some embodiments, heteromultimers of the disclosure comprise at least one TGFBRII polypeptide that is at least 70%, 75%, 80%, 85%, 90%, 91%, 92%, 93%, 94%, 95%, 96%, 97%, 98%, 99%, or 100% identical to the amino acid sequence of SEQ ID NOs: 42, 43, 67, or 68, with or without insertion of SEQ ID NO: 95 as described above. In some embodiments, heteromultimers of the disclosure comprise at least one TGFBRII polypeptide that is at least 70%, 75%, 80%, 85%, 90%, 91%, 92%, 93%, 94%, 95%, 96%, 97%, 98%, 99%, or 100% identical to a polypeptide that begins at any one of amino acids of 23-51 (e.g., amino acid residues 23, 24, 25, 26, 27, 28, 29, 30, 31, 32, 33, 34, 35, 36, 37, 38, 39, 40, 41, 42, 43, 44, 45, 46, 47, 48, 49, 50, or 51) of SEQ ID NO: 42, and ends at any one of amino acids 143-166 (e.g., amino acid residues 143, 144, 145, 146, 147, 148, 149, 150, 151, 152, 153, 154, 155, 156, 157, 158, 159, 160, 161, 162, 163, 164, 165, or 166) of SEQ ID NO: 42. In some embodiments, heteromultimers of the disclosure comprise at least one TGFBRII polypeptide that is at least 70%, 75%, 80%, 85%, 90%, 91%, 92%, 93%, 94%, 95%, 96%, 97%, 98%, 99%, or 100% identical to amino acids of 23-143 of SEQ ID NO: 42. In some embodiments, heteromultimers of the disclosure comprise at least one TGFBRII polypeptide that is at least 70%, 75%, 80%, 85%, 90%, 91%, 92%, 93%, 94%, 95%, 96%, 97%, 98%, 99%, or 100% identical to amino acids of 51-143 of SEQ ID NO: 42. In some embodiments, heteromultimers of the disclosure comprise at least one TGFBRII polypeptide that is at least 70%, 75%, 80%, 85%, 90%, 91%, 92%, 93%, 94%, 95%, 96%, 97%, 98%, 99%, or 100% identical to amino acids of 23-166 of SEQ ID NO: 42. In some embodiments, heteromultimers of the disclosure comprise at least one TGFBRII polypeptide that is at least 70%, 75%, 80%, 85%, 90%, 91%, 92%, 93%, 94%, 95%, 96%, 97%, 98%, 99%, or 100% identical to amino acids of 51-166 of SEQ ID NO: 42. In some embodiments, heteromultimers of the disclosure comprise at least one TGFBRII polypeptide that is at least 70%, 75%, 80%, 85%, 90%, 91%, 92%, 93%, 94%, 95%, 96%, 97%, 98%, 99%, or 100% identical to a polypeptide that begins at any one of amino acids of 23-44 (e.g., amino acid residues 23, 24, 25, 26, 27, 28, 29, 30, 31, 32, 33, 34, 35, 36, 37, 38, 39, 40, 41, 42, 43, or 44) of SEQ ID NO: 67, and ends at any one of amino acids 168-191 (e.g., amino acid residues 168, 169, 170, 171, 172, 173, 174, 175, 176, 177, 178, 179, 180, 181, 182, 183, 184, 185, 186, 187, 188, 189, 190, or 191) of SEQ ID NO: 67. In some embodiments, heteromultimers of the disclosure comprise at least one TGFBRII polypeptide that is at least 70%, 75%, 80%, 85%, 90%, 91%, 92%, 93%, 94%, 95%, 96%, 97%, 98%, 99%, or 100% identical to amino acids of 23-168 of SEQ ID NO: 67. In some embodiments, heteromultimers of the disclosure comprise at least one TGFBRII polypeptide that is at least 70%, 75%, 80%, 85%, 90%, 91%, 92%, 93%, 94%, 95%, 96%, 97%, 98%, 99%, or 100% identical to amino acids of 23-191 of SEQ ID NO: 67. In some embodiments, heteromultimers of the disclosure comprise at least one TGFBRII polypeptide that is at least 70%, 75%, 80%, 85%, 90%, 91%, 92%, 93%, 94%, 95%, 96%, 97%, 98%, 99%, or 100% identical to amino acids of 44-168 of SEQ ID NO: 67. In some embodiments, heteromultimers of the disclosure comprise at least one TGFBRII polypeptide that is at least 70%, 75%, 80%, 85%, 90%, 91%, 92%, 93%, 94%, 95%, 96%, 97%, 98%, 99%, or 100% identical to amino acids of 44-191 of SEQ ID NO: 67.

[0342] In certain aspects, the present disclosure relates to heteromultimers that comprise a BMPRII polypeptide. As used herein, the term “BMPRII” refers to a family of bone morphogenetic protein receptor type II (BMPRII) proteins from any species and variants derived from such BMPRII proteins by mutagenesis or other modification. Reference to BMPRII herein is understood to be a reference to any one of the currently identified forms. Members of the BMPRII family are generally transmembrane proteins, composed of a ligand-binding extracellular domain with a cysteine-rich region, a transmembrane domain, and a cytoplasmic domain with predicted serine/threonine kinase activity.

[0343] The term “BMPRII polypeptide” includes polypeptides comprising any naturally occurring polypeptide of a BMPRII family member as well as any variants thereof (including mutants, fragments, fusions, and peptidomimetic forms) that retain a useful activity.

[0344] A human BMPRII precursor protein sequence (NCBI Ref Seq NP_001195.2) is as follows:

| (SEQ ID NO: 46) | |
|---|---|
| 1 | MTSSLQRPWR VPWLPWTILL VSTAAASQNQ ERLCAFKDPY QQDLGIGESR |
| 51 | ISHENGTILC SKGSTCYGLW EKSKGDINLV KQGCWSHIGD PQECHYEECV |
| 101 | VTTTPPSIQN GTYRFCCCST DLCNVNFTEN FPPPDTTPLS PPHSFNRDET |
| 151 | IIIALASVSV LAVLIVALCF GYRMLTGDRK QGLHSMNMME AAASEPSLDL |
| 201 | DNLKLLELIG RGRYGAVYKG SLDERPVAVK VFSFANRQNF INEKNIYRVP |
| 251 | LMEHDNIARF IVGDERVTAD GRMEYLLVME YYPNGSLCKY LSLHTSDWVS |
| 301 | SCRLAHSVTR GLAYLHTELP RGDHYKPAIS HRDLNSRNVL VKNDGTCVIS |
| 351 | DFGLSMRLTG NRLVRPGEED NAAISEVGTI RYMAPEVLEG AVNLRDCESA |
| 401 | LKQVDMYALG LIYWEIFMRC TDLFPGESVP EYQMAFQTEV GNHPTFEDMQ |
| 451 | VLVSREKQRP KFPEAWKENS LAVRSLKETI EDCWDQDAEA RLTAQCAEER |
| 501 | MAELMMIWER NKSVSPTVNP MSTAMQNERN LSHNRRVPKI GPYPDYSSSS |
| 551 | YIEDSIHHTD SIVKNISSEH SMSSTPLTIG EKNRNSINYE RQQAQARIPS |
| 601 | PETSVTSLST NTTTTNTTGL TPSTGMTTIS EMPYPDETNL HTTNVAQSIG |
| 651 | PTPVCLQLTE EDLETNKLDP KEVDKNLKES SDENLMEHSL KQFSGPDPLS |
| 701 | STSSSLLYPL IKLAVEATGQ QDFTQTANGQ ACLIPDVLPT QIYPLPKQQN |
| 751 | LPKRPTSLPL NTKNSTKEPR LKFGSKHKSN LKQVETGVAK MNTINAAEPH |
| 801 | VVTVTMNGVA GRNHSVNSHA ATTQYANGTV LSGQTTNIVT HRAQEMLQNQ |
| 851 | FIGEDTRLNI NSSPDEHEPL LRREQQAGHD EGVLDRLVDR RERPLEGGRT |
| 901 | NSNNNNSNPC SEQDVLAQGV PSTAADPGPS KPRRAQRPNS LDLSATNVLD |
| 951 | GSSIQIGEST QDGKSGSGEK IKKRVKTPYS LKRWRPSTWV ISTESLDCEV |
| 1001 | NNNGSNRAVH SKSSTAVYLA EGGTATTMVS KDIGMNCL |

[0345] The signal peptide is indicated by a single underline and the extracellular domain is indicated in bold font.

[0346] A processed extracellular BMPRII polypeptide sequence is as follows:

(SEQ ID NO: 47)

[sequence omitted]

[0347] A nucleic acid sequence encoding BMPRII precursor protein is shown below (SEQ ID NO: 48), as follows nucleotides 1149-4262 of Genbank Reference Sequence NM_001204.6. The signal sequence is underlined.

(SEQ ID NO: 48)

ATGACTTCCTCGCTGCAGCGGCCCTGGCGGGTGCCCTGGCTACCATGGAC
CATCCTGCTGGTCAGCACTGCGGCTGCTTCGCAGAATCAAGAACGGCTAT
GTGCGTTTAAAGATCCGTATCAGCAAGACCTTGGGATAGGTGAGAGTAGA
ATCTCTCATGAAAATGGGACAATATTATGCTCGAAAGGTAGCACCTGCTA
TGGCCTTTGGGAGAAATCAAAAGGGGACATAAATCTTGTAAAACAAGGAT
GTTGGTCTCACATTGGAGATCCCCAAGAGTGTCACTATGAAGAATGTGTA
GTAACTACCACTCCTCCCTCAATTCAGAATGGAACATACCGTTTCTGCTG
TTGTAGCACAGATTTATGTAATGTCAACTTTACTGAGAATTTTCCACCTC
CTGACACAACACCACTCAGTCCACCTCATTCATTTAACCGAGATGAGACA
ATAATCATTGCTTTGGCATCAGTCTCTGTATTAGCTGTTTTGATAGTTGC
CTTATGCTTTGGATACAGAATGTTGACAGGAGACCGTAAACAAGGTCTTC
ACAGTATGAACATGATGGAGGCAGCAGCATCCGAACCCTCTCTTGATCTA
GATAATCTGAAACTGTTGGAGCTGATTGGCCGAGGTCGATATGGAGCAGT
ATATAAAGGCTCCTTGGATGAGCGTCCAGTTGCTGTAAAAGTGTTTTCCT
TTGCAAACCGTCAGAATTTTATCAACGAAAAGAACATTTACAGAGTGCCT
TTGATGGAACATGACAACATTGCCCGCTTTATAGTTGGAGATGAGAGAGT
CACTGCAGATGGACGCATGGAATATTTGCTTGTGATGGAGTACTATCCCA
ATGGATCTTTATGCAAGTATTTAAGTCTCCACACAAGTGACTGGGTAAGC
TCTTGCCGTCTTGCTCATTCTGTTACTAGAGGACTGGCTTATCTTCACAC
AGAATTACCACGAGGAGATCATTATAAACCTGCAATTTCCCATCGAGATT
TAAACAGCAGAAATGTCCTAGTGAAAAATGATGGAACCTGTGTTATTAGT
GACTTTGGACTGTCCATGAGGCTGACTGGAAATAGACTGGTGCGCCCAGG
GGAGGAAGATAATGCAGCCATAAGCGAGGTTGGCACTATCAGATATATGG
CACCAGAAGTGCTAGAAGGAGCTGTGAACTTGAGGGACTGTGAATCAGCT
TTGAAACAAGTAGACATGTATGCTCTTGGACTAATCTATTGGGAGATATT
TATGAGATGTACAGACCTCTTCCCAGGGGAATCCGTACCAGAGTACCAGA
TGGCTTTTCAGACAGAGGTTGGAAACCATCCCACTTTTGAGGATATGCAG
GTTCTCGTGTCTAGGGAAAAACAGAGACCCAAGTTCCCAGAAGCCTGGAA
AGAAAATAGCCTGGCAGTGAGGTCACTCAAGGAGACAATCGAAGACTGTT
GGGACCAGGATGCAGAGGCTCGGCTTACTGCACAGTGTGCTGAGGAAAGG
ATGGCTGAACTTATGATGATTTGGGAAAGAAACAAATCTGTGAGCCCAAC
AGTCAATCCAATGTCTACTGCTATGCAGAATGAACGCAACCTGTCACATA
ATAGGCGTGTGCCAAAAATTGGTCCTTATCCAGATTATTCTTCCTCCTCA
TACATTGAAGACTCTATCCATCATACTGACAGCATCGTGAAGAATATTTC
CTCTGAGCATTCTATGTCCAGCACACCTTTGACTATAGGGGAAAAAAACC
GAAATTCAATTAACTATGAACGACAGCAAGCACAAGCTCGAATCCCCAGC
CCTGAAACAAGTGTCACCAGCCTCTCCACCAACACAACAACCACAAACAC
CACAGGACTCACGCCAAGTACTGGCATGACTACTATATCTGAGATGCCAT
ACCCAGATGAAACAAATCTGCATACCACAAATGTTGCACAGTCAATTGGG
CCAACCCCTGTCTGCTTACAGCTGACAGAAGAAGACTTGGAAACCAACAA
GCTAGACCCAAAAGAAGTTGATAAGAACCTCAAGGAAAGCTCTGATGAGA
ATCTCATGGAGCACTCTCTTAAACAGTTCAGTGGCCCAGACCCACTGAGC
AGTACTAGTTCTAGCTTGCTTTACCCACTCATAAAACTTGCAGTAGAAGC
AACTGGACAGCAGGACTTCACACAGACTGCAAATGGCCAAGCATGTTTGA
TTCCTGATGTTCTGCCTACTCAGATCTATCCTCTCCCCAAGCAGCAGAAC
CTTCCCAAGAGACCTACTAGTTTGCCTTTGAACACCAAAAATTCAACAAA
AGAGCCCCGGCTAAAATTTGGCAGCAAGCACAAATCAAACTTGAAACAAG
TCGAAACTGGAGTTGCCAAGATGAATACAATCAATGCAGCAGAACCTCAT
GTGGTGACAGTCACCATGAATGGTGTGGCAGGTAGAAACCACAGTGTTAA
CTCCCATGCTGCCACAACCCAATATGCCAATGGGACAGTACTATCTGGCC
AAACAACCAACATAGTGACACATAGGGCCCAAGAAATGTTGCAGAATCAG
TTTATTGGTGAGGACACCCGGCTGAATATTAATTCCAGTCCTGATGAGCA
TGAGCCTTTACTGAGACGAGAGCAACAAGCTGGCCATGATGAAGGTGTTC
TGGATCGTCTTGTGGACAGGAGGGAACGGCCACTAGAAGGTGGCCGAACT
AATTCCAATAACAACAACAGCAATCCATGTTCAGAACAAGATGTTCTTGC
ACAGGGTGTTCCAAGCACAGCAGCAGATCCTGGGCCATCAAAGCCCAGAA
GAGCACAGAGGCCTAATTCTCTGGATCTTTCAGCCACAAATGTCCTGGAT
GGCAGCAGTATACAGATAGGTGAGTCAACACAAGATGGCAAATCAGGATC
AGGTGAAAAGATCAAGAAACGTGTGAAAACTCCCTATTCTCTTAAGCGGT
GGCGCCCCTCCACCTGGGTCATCTCCACTGAATCGCTGGACTGTGAAGTC
AACAATAATGGCAGTAACAGGGCAGTTCATTCCAAATCCAGCACTGCTGT
TTACCTTGCAGAAGGAGGCACTGCTACAACCATGGTGTCTAAAGATATAG
GAATGAACTGTCTG

[0348] A nucleic acid sequence encoding an extracellular BMPRII polypeptide is as follows:

(SEQ ID NO: 49)

TCGCAGAATCAAGAACGGCTATGTGCGTTTAAAGATCCGTATCAGCAAGA
CCTTGGGATAGGTGAGAGTAGAATCTCTCATGAAAATGGGACAATATTAT
GCTCGAAAGGTAGCACCTGCTATGGCCTTTGGGAGAAATCAAAAGGGGAC
ATAAATCTTGTAAAACAAGGATGTTGGTCTCACATTGGAGATCCCCAAGA
GTGTCACTATGAAGAATGTGTAGTAACTACCACTCCTCCCTCAATTCAGA
ATGGAACATACCGTTTCTGCTGTTGTAGCACAGATTTATGTAATGTCAAC
TTTACTGAGAATTTTCCACCTCCTGACACAACACCACTCAGTCCACCTCA
TTCATTTAACCGAGATGAGACA

[0349] An alternative isoform of BMPRII, isoform 2 (GenBank: AAA86519.1) is as follows:

| (SEQ ID NO: 71) | |
|---|---|
| 1 | MTSSLQRPWR VPWLPWTILL VSTAAASQNQ ERLCAFKDPY QQDLGIGESR |
| 51 | ISHENGTILC SKGSTCYGLW EKSKGDINLV KQGCWSHIGD PQECHYEECV |
| 101 | VTTTPPSIQN GTYRFCCCST DLCNVNFTEN FPPPDTTPLS PPHSFNRDET |
| 151 | IIIALASVSV LAVLIVALCF GYRMLTGDRK QGLHSMNMME AAASEPSLDL |
| 201 | DNLKLLELIG RGRYGAVYKG SLDERPVAVK VFSFANRQNF INEKNIYRVP |
| 251 | LMEHDNIARF IVGDERVTAD GRMEYLLVME YYPNGSLCKY LSLHTSDWVS |
| 301 | SCRLAHSVTR GLAYLHTELP RGDHYKPAIS HRDLNSRNVL VKNDGTCVIS |
| 351 | DFGLSMRLTG NRLVRPGEED NAAISEVGTI RYMAPEVLEG AVNLRDCESA |
| 401 | LKQVDMYALG LIYWEIFMRC TDLFPGESVP EYQMAFQTEV GNHPTFEDMQ |
| 451 | VLVSREKQRP KFPEAWKENS LAVRSLKETI EDCWDQDAEA RLTAQCAEER |
| 501 | MAELMMIWER NKSVSPTVNP MSTAMQNERR |

[0350] The signal peptide is indicated by a single underline and the extracellular domain is indicated in bold font.

[0351] A processed extracellular BMPRII polypeptide sequence (isoform 2) is as follows:

(SEQ ID NO: 72)

[sequence omitted]

[0352] A nucleic acid sequence encoding human BMPRII precursor protein (isoform 2) is shown below (SEQ ID NO: 73), corresponding to nucleotides 163-1752 of Genbank Reference Sequence U25110.1. The signal sequence is underlined.

(SEQ ID NO: 73)

ATGACTTCCTCGCTGCAGCGGCCCTGGCGGGTGCCCTGGCTACCATGGAC
CATCCTGCTGGTCAGCACTGCGGCTGCTTCGCAGAATCAAGAACGGCTAT
GTGCGTTTAAAGATCCGTATCAGCAAGACCTTGGGATAGGTGAGAGTAGA
ATCTCTCATGAAAATGGGACAATATTATGCTCGAAAGGTAGCACCTGCTA
TGGCCTTTGGGAGAAATCAAAAGGGGACATAAATCTTGTAAAACAAGGAT
GTTGGTCTCACATTGGAGATCCCCAAGAGTGTCACTATGAAGAATGTGTA
GTAACTACCACTCCTCCCTCAATTCAGAATGGAACATACCGTTTCTGCTG
TTGTAGCACAGATTTATGTAATGTCAACTTTACTGAGAATTTTCCACCTC
CTGACACAACACCACTCAGTCCACCTCATTCATTTAACCGAGATGAGACA
ATAATCATTGCTTTGGCATCAGTCTCTGTATTAGCTGTTTTGATAGTTGC
CTTATGCTTTGGATACAGAATGTTGACAGGAGACCGTAAACAAGGTCTTC
ACAGTATGAACATGATGGAGGCAGCAGCATCCGAACCCTCTCTTGATCTA
GATAATCTGAAACTGTTGGAGCTGATTGGCCGAGGTCGATATGGAGCAGT
ATATAAAGGCTCCTTGGATGAGCGTCCAGTTGCTGTAAAAGTGTTTTCCT
TTGCAAACCGTCAGAATTTTATCAACGAAAAGAACATTTACAGAGTGCCT
TTGATGGAACATGACAACATTGCCCGCTTTATAGTTGGAGATGAGAGAGT
CACTGCAGATGGACGCATGGAATATTTGCTTGTGATGGAGTACTATCCCA
ATGGATCTTTATGCAAGTATTTAAGTCTCCACACAAGTGACTGGGTAAGC
TCTTGCCGTCTTGCTCATTCTGTTACTAGAGGACTGGCTTATCTTCACAC
AGAATTACCACGAGGAGATCATTATAAACCTGCAATTTCCCATCGAGATT
TAAACAGCAGAAATGTCCTAGTGAAAAATGATGGAACCTGTGTTATTAGT
GACTTTGGACTGTCCATGAGGCTGACTGGAAATAGACTGGTGCGCCCAGG
GGAGGAAGATAATGCAGCCATAAGCGAGGTTGGCACTATCAGATATATGG
CACCAGAAGTGCTAGAAGGAGCTGTGAACTTGAGGGACTGTGAATCAGCT
TTGAAACAAGTAGACATGTATGCTCTTGGACTAATCTATTGGGAGATATT
TATGAGATGTACAGACCTCTTCCCAGGGGAATCCGTACCAGAGTACCAGA
TGGCTTTTCAGACAGAGGTTGGAAACCATCCCACTTTTGAGGATATGCAG
GTTCTCGTGTCTAGGGAAAAACAGAGACCCAAGTTCCCAGAAGCCTGGAA
AGAAAATAGCCTGGCAGTGAGGTCACTCAAGGAGACAATCGAAGACTGTT
GGGACCAGGATGCAGAGGCTCGGCTTACTGCACAGTGTGCTGAGGAAAGG
ATGGCTGAACTTATGATGATTTGGGAAAGAAACAAATCTGTGAGCCCAAC
AGTCAATCCAATGTCTACTGCTATGCAGAATGAACGTAGG

[0353] A nucleic acid sequence encoding an extracellular BMPRII polypeptide (isoform 2) is as follows:

(SEQ ID NO: 74)

TCGCAGAATCAAGAACGGCTATGTGCGTTTAAAGATCCGTATCAGCAAGA
CCTTGGGATAGGTGAGAGTAGAATCTCTCATGAAAATGGGACAATATTAT
GCTCGAAAGGTAGCACCTGCTATGGCCTTTGGGAGAAATCAAAAGGGGAC
ATAAATCTTGTAAAACAAGGATGTTGGTCTCACATTGGAGATCCCCAAGA
GTGTCACTATGAAGAATGTGTAGTAACTACCACTCCTCCCTCAATTCAGA
ATGGAACATACCGTTTCTGCTGTTGTAGCACAGATTTATGTAATGTCAAC
TTTACTGAGAATTTTCCACCTCCTGACACAACACCACTCAGTCCACCTCA
TTCATTTAACCGAGATGAGACA

[0354] In certain embodiments, the disclosure relates to heteromultimers that comprise at least one BMPRII polypeptide, which includes fragments, functional variants, and modified forms thereof. Preferably, BMPRII polypeptides for use in accordance with the disclosure (e.g., heteromultimers comprising a BMPRII polypeptide and uses thereof) are soluble (e.g., an extracellular domain of BMPRII). In other preferred embodiments, BMPRII polypeptides for use in accordance with the disclosure bind to and/or inhibit (antagonize) activity (e.g., Smad signaling) of one or more TGF-beta superfamily ligands. In some embodiments, heteromultimers of the disclosure comprise at least one BMPRII polypeptide that is at least 70%, 75%, 80%, 85%, 90%, 91%, 92%, 93%, 94%, 95%, 96%, 97%, 98%, 99%, or 100% identical to the amino acid sequence of SEQ ID NO: 46, 47, 71, or 72. In some embodiments, heteromultimers of the disclosure comprise at least one BMPRII polypeptide that is at least 70%, 75%, 80%, 85%, 90%, 91%, 92%, 93%, 94%, 95%, 96%, 97%, 98%, 99%, or 100% identical to a polypeptide that begins at any one of amino acids of 27-34 (e.g., amino acid residues 27, 28, 29, 30, 31, 32, 33, or 34) of SEQ ID NO: 46, and ends at any one of amino acids 123-150 (e.g., amino acid residues 123, 124, 125, 126, 127, 128, 129, 130, 131, 132, 133, 134, 135, 136, 137, 138, 139, 140, 141, 142, 143, 144, 145, 146, 147, 148, 149, or 150) of SEQ ID NO: 46. In some embodiments, heteromultimers of the disclosure comprise at least one BMPRII polypeptide that is at least 70%, 75%, 80%, 85%, 90%, 91%, 92%, 93%, 94%, 95%, 96%, 97%, 98%, 99%, or 100% identical to amino acids of 27-123 of SEQ ID NO: 46. In some embodiments, heteromultimers of the disclosure comprise at least one BMPRII polypeptide that is at least 70%, 75%, 80%, 85%, 90%, 91%, 92%, 93%, 94%, 95%, 96%, 97%, 98%, 99%, or 100% identical to amino acids of 27-150 of SEQ ID NO: 46. In some embodiments, heteromultimers of the disclosure comprise at least one BMPRII polypeptide that is at least 70%, 75%, 80%, 85%, 90%, 91%, 92%, 93%, 94%, 95%, 96%, 97%, 98%, 99%, or 100% identical to amino acids of 34-123 of SEQ ID NO: 46. In some embodiments, heteromultimers of the disclosure comprise at least one BMPRII polypeptide that is at least 70%, 75%, 80%, 85%, 90%, 91%, 92%, 93%, 94%, 95%, 96%, 97%, 98%, 99%, or 100% identical to amino acids of 34-150 of SEQ ID NO: 46. In some embodiments, heteromultimers of the disclosure comprise at least one BMPRII polypeptide that is at least 70%, 75%, 80%, 85%, 90%, 91%, 92%, 93%, 94%, 95%, 96%, 97%, 98%, 99%, or 100% identical to a polypeptide that begins at any one of amino acids of 27-34 (e.g., amino acid residues 27, 28, 29, 30, 31, 32, 33, or 34) of SEQ ID NO: 71, and ends at any one of amino acids 123-150 (e.g., amino acid residues 123, 124, 125, 126, 127, 128, 129, 130, 131, 132, 133, 134, 135, 136, 137, 138, 139, 140, 141, 142, 143, 144, 145, 146, 147, 148, 149, or 150) of SEQ ID NO: 71. In some embodiments, heteromultimers of the disclosure comprise at least one BMPRII polypeptide that is at least 70%, 75%, 80%, 85%, 90%, 91%, 92%, 93%, 94%, 95%, 96%, 97%, 98%, 99%, or 100% identical to amino acids of 27-123 of SEQ ID NO: 71. In some embodiments, heteromultimers of the disclosure comprise at least one BMPRII polypeptide that is at least 70%, 75%, 80%, 85%, 90%, 91%, 92%, 93%, 94%, 95%, 96%, 97%, 98%, 99%, or 100% identical to amino acids of 27-150 of SEQ ID NO: 71. In some embodiments, heteromultimers of the disclosure comprise at least one BMPRII polypeptide that is at least 70%, 75%, 80%, 85%, 90%, 91%, 92%, 93%, 94%, 95%, 96%, 97%, 98%, 99%, or 100% identical to amino acids of 34-123 of SEQ ID NO: 71. In some embodiments, heteromultimers of the disclosure comprise at least one BMPRII polypeptide that is at least 70%, 75%, 80%, 85%, 90%, 91%, 92%, 93%, 94%, 95%, 96%, 97%, 98%, 99%, or 100% identical to amino acids of 34-150 of SEQ ID NO: 71.

[0355] In certain aspects, the present disclosure relates to heteromultimers that comprise an MISRII polypeptide. As used herein, the term “MISRII” refers to a family of Müllerian inhibiting substance receptor type II (MISRII) proteins from any species and variants derived from such MISRII proteins by mutagenesis or other modification. Reference to MISRII herein is understood to be a reference to any one of the currently identified forms. Members of the MISRII family are generally transmembrane proteins, composed of a ligand-binding extracellular domain with a cysteine-rich region, a transmembrane domain, and a cytoplasmic domain with predicted serine/threonine kinase activity.

[0356] The term “MISRII polypeptide” includes polypeptides comprising any naturally occurring polypeptide of an MISRII family member as well as any variants thereof (including mutants, fragments, fusions, and peptidomimetic forms) that retain a useful activity.

[0357] The human MISRII isoform 1 precursor protein sequence (NCBI Ref Seq NP_065434.1) is as follows:

| (SEQ ID NO: 50) | |
|---|---|
| 1 | MLGSLGLWAL LPTAVEAPPN RRTCVFFEAP GVRGSTKTLG ELLDTGTELP |
| 51 | RAIRCLYSRC CFGIWNLTQD RAQVEMQGCR DSDEPGCESL HCDPSPRAHP |
| 101 | SPGSTLFTCS CGTDFCNANY SHLPPPGSPG TPGSQGPQAA PGESIWMALV |
| 151 | LLGLFLLLLL LLGSIILALL QRKNYRVRGE PVPEPRPDSG RDWSVELQEL |
| 201 | PELCFSQVIR EGGHAVVWAG QLQGKLVAIK AFPPRSVAQF QAERALYELP |
| 251 | GLQHDHIVRF ITASRGGPGR LLSGPLLVLE LHPKGSLCHY LTQYTSDWGS |
| 301 | SLRMALSLAQ GLAFLHEERW QNGQYKPGIA HRDLSSQNVL IREDGSCAIG |
| 351 | DLGLALVLPG LTQPPAWTPT QPQGPAAIME AGTQRYMAPE LLDKTLDLQD |
| 401 | WGMALRRADI YSLALLLWEI LSRCPDLRPD SSPPPFQLAY EAELGNTPTS |
| 451 | DELWALAVQE RRRPYIPSTW RCFATDPDGL RELLEDCWDA DPEARLTAEC |
| 501 | VQQRLAALAH PQESHPFPES CPRGCPPLCP EDCTSIPAPT ILPCRPQRSA |
| 551 | CHFSVQQGPC SRNPQPACTL SPV |

[0358] The signal peptide is indicated by a single underline and the extracellular domain is indicated in bold font.

[0359] A processed extracellular MISRII polypeptide sequence (isoform 1) is as follows:

(SEQ ID NO: 51)

[sequence omitted]

[0360] A nucleic acid sequence encoding the MISRII precursor protein is shown below (SEQ ID NO: 52), corresponding to nucleotides 81-1799 of Genbank Reference Sequence NM_020547.2. The signal sequence is underlined.

(SEQ ID NO: 52)

ATGCTAGGGTCTTTGGGGCTTTGGGCATTACTTCCCACAGCTGTGGAAGC
ACCCCCAAACAGGCGAACCTGTGTGTTCTTTGAGGCCCCTGGAGTGCGGG
GAAGCACAAAGACACTGGGAGAGCTGCTAGATACAGGCACAGAGCTCCCC
AGAGCTATCCGCTGCCTCTACAGCCGCTGCTGCTTTGGGATCTGGAACCT
GACCCAAGACCGGGCACAGGTGGAAATGCAAGGATGCCGAGACAGTGATG
AGCCAGGCTGTGAGTCCCTCCACTGTGACCCAAGTCCCCGAGCCCACCCC
AGCCCTGGCTCCACTCTCTTCACCTGCTCCTGTGGCACTGACTTCTGCAA
TGCCAATTACAGCCATCTGCCTCCTCCAGGGAGCCCTGGGACTCCTGGCT
CCCAGGGTCCCCAGGCTGCCCCAGGTGAGTCCATCTGGATGGCACTGGTG
CTGCTGGGGCTGTTCCTCCTCCTCCTGCTGCTGCTGGGCAGCATCATCTT
GGCCCTGCTACAGCGAAAGAACTACAGAGTGCGAGGTGAGCCAGTGCCAG
AGCCAAGGCCAGACTCAGGCAGGGACTGGAGTGTGGAGCTGCAGGAGCTG
CCTGAGCTGTGTTTCTCCCAGGTAATCCGGGAAGGAGGTCATGCAGTGGT
TTGGGCCGGGCAGCTGCAAGGAAAACTGGTTGCCATCAAGGCCTTCCCAC
CGAGGTCTGTGGCTCAGTTCCAAGCTGAGAGAGCATTGTACGAACTTCCA
GGCCTACAGCACGACCACATTGTCCGATTTATCACTGCCAGCCGGGGGGG
TCCTGGCCGCCTGCTCTCTGGGCCCCTGCTGGTACTGGAACTGCATCCCA
AGGGCTCCCTGTGCCACTACTTGACCCAGTACACCAGTGACTGGGGAAGT
TCCCTGCGGATGGCACTGTCCCTGGCCCAGGGCCTGGCATTTCTCCATGA
GGAGCGCTGGCAGAATGGCCAATATAAACCAGGTATTGCCCACCGAGATC
TGAGCAGCCAGAATGTGCTCATTCGGGAAGATGGATCGTGTGCCATTGGA
GACCTGGGCCTTGCCTTGGTGCTCCCTGGCCTCACTCAGCCCCCTGCCTG
GACCCCTACTCAACCACAAGGCCCAGCTGCCATCATGGAAGCTGGCACCC
AGAGGTACATGGCACCAGAGCTCTTGGACAAGACTCTGGACCTACAGGAT
TGGGGCATGGCCCTCCGACGAGCTGATATTTACTCTTTGGCTCTGCTCCT
GTGGGAGATACTGAGCCGCTGCCCAGATTTGAGGCCTGACAGCAGTCCAC
CACCCTTCCAACTGGCCTATGAGGCAGAACTGGGCAATACCCCTACCTCT
GATGAGCTATGGGCCTTGGCAGTGCAGGAGAGGAGGCGTCCCTACATCCC
ATCCACCTGGCGCTGCTTTGCCACAGACCCTGATGGGCTGAGGGAGCTCC
TAGAAGACTGTTGGGATGCAGACCCAGAAGCACGGCTGACAGCTGAGTGT
GTACAGCAGCGCCTGGCTGCCTTGGCCCATCCTCAAGAGAGCCACCCCTT
TCCAGAGAGCTGTCCACGTGGCTGCCCACCTCTCTGCCCAGAAGACTGTA
CTTCAATTCCTGCCCCTACCATCCTCCCCTGTAGGCCTCAGCGGAGTGCC
TGCCACTTCAGCGTTCAGCAAGGCCCTTGTTCCAGGAATCCTCAGCCTGC
CTGTACCCTTTCTCCTGTG

[0361] A nucleic acid sequence encoding an extracellular human MISRII polypeptide is as follows:

(SEQ ID NO: 53)

CCCCCAAACAGGCGAACCTGTGTGTTCTTTGAGGCCCCTGGAGTGCGGGG
AAGCACAAAGACACTGGGAGAGCTGCTAGATACAGGCACAGAGCTCCCCA
GAGCTATCCGCTGCCTCTACAGCCGCTGCTGCTTTGGGATCTGGAACCTG
ACCCAAGACCGGGCACAGGTGGAAATGCAAGGATGCCGAGACAGTGATGA
GCCAGGCTGTGAGTCCCTCCACTGTGACCCAAGTCCCCGAGCCCACCCCA
GCCCTGGCTCCACTCTCTTCACCTGCTCCTGTGGCACTGACTTCTGCAAT
GCCAATTACAGCCATCTGCCTCCTCCAGGGAGCCCTGGGACTCCTGGCTC
CCAGGGTCCCCAGGCTGCCCCAGGTGAGTCCATCTGGATGGCACTG

[0362] An alternative isoform of the human MISRII precursor protein sequence, isoform 2 (NCBI Ref Seq NP_001158162.1), is as follows:

| (SEQ ID NO: 75) | |
|---|---|
| 1 | MLGSLGLWAL LPTAVEAPPN RRTCVFFEAP GVRGSTKTLG ELLDTGTELP |
| 051 | RAIRCLYSRC CFGIWNLTQD RAQVEMQGCR DSDEPGCESL HCDPSPRAHP |
| 101 | SPGSTLFTCS CGTDFCNANY SHLPPPGSPG TPGSQGPQAA PGESIWMALV |
| 151 | LLGLFLLLLL LLGSIILALL QRKNYRVRGE PVPEPRPDSG RDWSVELQEL |
| 201 | PELCFSQVIR EGGHAVVWAG QLQGKLVAIK AFPPRSVAQF QAERALYELP |
| 251 | GLQHDHIVRF ITASRGGPGR LLSGPLLVLE LHPKGSLCHY LTQYTSDWGS |
| 301 | SLRMALSLAQ GLAFLHEERW QNGQYKPGIA HRDLSSQNVL IREDGSCAIG |
| 351 | DLGLALVLPG LTQPPAWTPT QPQGPAAIME AGTQRYMAPE LLDKTLDLQD |
| 401 | WGMALRRADI YSLALLLWEI LSRCPDLRPA VHHPSNWPMR QNWAIPLPLM |
| 451 | SYGPWQCRRG GVPTSHPPGA ALPQTLMG |

[0363] The signal peptide is indicated by a single underline and the extracellular domain is indicated in bold font.

[0364] A processed extracellular MISRII polypeptide sequence (isoform 2) is as follows:

(SEQ ID NO: 76)

[sequence omitted]

[0365] A nucleic acid sequence encoding the MISRII precursor protein (isoform 2) is shown below (SEQ ID NO: 77), corresponding to nucleotides 81-1514 of Genbank Reference Sequence NM_001164690.1. The signal sequence is underlined.

(SEQ ID NO: 77)

ATGCTAGGGTCTTTGGGGCTTTGGGCATTACTTCCCACAGCTGTGGAAGC
ACCCCCAAACAGGCGAACCTGTGTGTTCTTTGAGGCCCCTGGAGTGCGGG
GAAGCACAAAGACACTGGGAGAGCTGCTAGATACAGGCACAGAGCTCCCC
AGAGCTATCCGCTGCCTCTACAGCCGCTGCTGCTTTGGGATCTGGAACCT
GACCCAAGACCGGGCACAGGTGGAAATGCAAGGATGCCGAGACAGTGATG
AGCCAGGCTGTGAGTCCCTCCACTGTGACCCAAGTCCCCGAGCCCACCCC
AGCCCTGGCTCCACTCTCTTCACCTGCTCCTGTGGCACTGACTTCTGCAA
TGCCAATTACAGCCATCTGCCTCCTCCAGGGAGCCCTGGGACTCCTGGCT
CCCAGGGTCCCCAGGCTGCCCCAGGTGAGTCCATCTGGATGGCACTGGTG
CTGCTGGGGCTGTTCCTCCTCCTCCTGCTGCTGCTGGGCAGCATCATCTT
GGCCCTGCTACAGCGAAAGAACTACAGAGTGCGAGGTGAGCCAGTGCCAG
AGCCAAGGCCAGACTCAGGCAGGGACTGGAGTGTGGAGCTGCAGGAGCTG
CCTGAGCTGTGTTTCTCCCAGGTAATCCGGGAAGGAGGTCATGCAGTGGT
TTGGGCCGGGCAGCTGCAAGGAAAACTGGTTGCCATCAAGGCCTTCCCAC
CGAGGTCTGTGGCTCAGTTCCAAGCTGAGAGAGCATTGTACGAACTTCCA
GGCCTACAGCACGACCACATTGTCCGATTTATCACTGCCAGCCGGGGGGG
TCCTGGCCGCCTGCTCTCTGGGCCCCTGCTGGTACTGGAACTGCATCCCA
AGGGCTCCCTGTGCCACTACTTGACCCAGTACACCAGTGACTGGGGAAGT
TCCCTGCGGATGGCACTGTCCCTGGCCCAGGGCCTGGCATTTCTCCATGA
GGAGCGCTGGCAGAATGGCCAATATAAACCAGGTATTGCCCACCGAGATC
TGAGCAGCCAGAATGTGCTCATTCGGGAAGATGGATCGTGTGCCATTGGA
GACCTGGGCCTTGCCTTGGTGCTCCCTGGCCTCACTCAGCCCCCTGCCTG
GACCCCTACTCAACCACAAGGCCCAGCTGCCATCATGGAAGCTGGCACCC
AGAGGTACATGGCACCAGAGCTCTTGGACAAGACTCTGGACCTACAGGAT
TGGGGCATGGCCCTCCGACGAGCTGATATTTACTCTTTGGCTCTGCTCCT
GTGGGAGATACTGAGCCGCTGCCCAGATTTGAGGCCTGCAGTCCACCACC
CTTCCAACTGGCCTATGAGGCAGAACTGGGCAATACCCCTACCTCTGATG
AGCTATGGGCCTTGGCAGTGCAGGAGAGGAGGCGTCCCTACATCCCATCC
ACCTGGCGCTGCTTTGCCACAGACCCTGATGGGC

[0366] The nucleic acid sequence encoding a processed soluble (extracellular) human MISRII polypeptide (isoform 2) is as follows:

(SEQ ID NO: 78)

CCCCCAAACAGGCGAACCTGTGTGTTCTTTGAGGCCCCTGGAGTGCGGGG
AAGCACAAAGACACTGGGAGAGCTGCTAGATACAGGCACAGAGCTCCCCA
GAGCTATCCGCTGCCTCTACAGCCGCTGCTGCTTTGGGATCTGGAACCTG
ACCCAAGACCGGGCACAGGTGGAAATGCAAGGATGCCGAGACAGTGATGA
GCCAGGCTGTGAGTCCCTCCACTGTGACCCAAGTCCCCGAGCCCACCCCA
GCCCTGGCTCCACTCTCTTCACCTGCTCCTGTGGCACTGACTTCTGCAAT
GCCAATTACAGCCATCTGCCTCCTCCAGGGAGCCCTGGGACTCCTGGCTC
CCAGGGTCCCCAGGCTGCCCCAGGTGAGTCCATCTGGATGGCACTG

[0367] An alternative isoform of the human MISRII precursor protein sequence, isoform 3 (NCBI Ref Seq NP_001158163.1), is as follows:

| (SEQ ID NO: 79) | |
|---|---|
| 1 | MLGSLGLWAL LPTAVEAPPN RRTCVFFEAP GVRGSTKTLG ELLDTGTELP |
| 51 | RAIRCLYSRC CFGIWNLTQD RAQVEMQGCR DSDEPGCESL HCDPSPRAHP |
| 101 | SPGSTLFTCS CGTDFCNANY SHLPPPGSPG TPGSQGPQAA PGESIWMALV |
| 151 | LLGLFLLLLL LLGSIILALL QRKNYRVRGE PVPEPRPDSG RDWSVELQEL |
| 201 | PELCFSQVIR EGGHAVVWAG QLQGKLVAIK AFPPRSVAQF QAERALYELP |
| 251 | GLQHDHIVRF ITASRGGPGR LLSGPLLVLE LHPKGSLCHY LTQYTSDWGS |
| 301 | SLRMALSLAQ GLAFLHEERW QNGQYKPGIA HRDLSSQNVL IREDGSCAIG |
| 351 | DLGLALVLPG LTQPPAWTPT QPQGPAAIME DPDGLRELLE DCWDADPEAR |
| 401 | LTAECVQQRL AALAHPQESH PFPESCPRGC PPLCPEDCTS IPAPTILPCR |
| 451 | PQRSACHFSV QQGPCSRNPQ PACTLSPV |

[0368] The signal peptide is indicated by a single underline and the extracellular domain is indicated in bold font.

[0369] A processed extracellular MISRII polypeptide sequence (isoform 3) is as follows:

(SEQ ID NO: 80)

[sequence omitted]

[0370] A nucleic acid sequence encoding human MISRII precursor protein (isoform 3) is shown below (SEQ ID NO: 81), corresponding to nucleotides 81-1514 of Genbank Reference Sequence NM_001164691.1. The signal sequence is underlined.

(SEQ ID NO: 81)

ATGCTAGGGTCTTTGGGGCTTTGGGCATTACTTCCCACAGCTGTGGAAGC
ACCCCCAAACAGGCGAACCTGTGTGTTCTTTGAGGCCCCTGGAGTGCGGG
GAAGCACAAAGACACTGGGAGAGCTGCTAGATACAGGCACAGAGCTCCCC
AGAGCTATCCGCTGCCTCTACAGCCGCTGCTGCTTTGGGATCTGGAACCT
GACCCAAGACCGGGCACAGGTGGAAATGCAAGGATGCCGAGACAGTGATG
AGCCAGGCTGTGAGTCCCTCCACTGTGACCCAAGTCCCCGAGCCCACCCC
AGCCCTGGCTCCACTCTCTTCACCTGCTCCTGTGGCACTGACTTCTGCAA
TGCCAATTACAGCCATCTGCCTCCTCCAGGGAGCCCTGGGACTCCTGGCT
CCCAGGGTCCCCAGGCTGCCCCAGGTGAGTCCATCTGGATGGCACTGGTG
CTGCTGGGGCTGTTCCTCCTCCTCCTGCTGCTGCTGGGCAGCATCATCTT
GGCCCTGCTACAGCGAAAGAACTACAGAGTGCGAGGTGAGCCAGTGCCAG
AGCCAAGGCCAGACTCAGGCAGGGACTGGAGTGTGGAGCTGCAGGAGCTG
CCTGAGCTGTGTTTCTCCCAGGTAATCCGGGAAGGAGGTCATGCAGTGGT
TTGGGCCGGGCAGCTGCAAGGAAAACTGGTTGCCATCAAGGCCTTCCCAC
CGAGGTCTGTGGCTCAGTTCCAAGCTGAGAGAGCATTGTACGAACTTCCA
GGCCTACAGCACGACCACATTGTCCGATTTATCACTGCCAGCCGGGGGGG
TCCTGGCCGCCTGCTCTCTGGGCCCCTGCTGGTACTGGAACTGCATCCCA
AGGGCTCCCTGTGCCACTACTTGACCCAGTACACCAGTGACTGGGGAAGT
TCCCTGCGGATGGCACTGTCCCTGGCCCAGGGCCTGGCATTTCTCCATGA
GGAGCGCTGGCAGAATGGCCAATATAAACCAGGTATTGCCCACCGAGATC
TGAGCAGCCAGAATGTGCTCATTCGGGAAGATGGATCGTGTGCCATTGGA
GACCTGGGCCTTGCCTTGGTGCTCCCTGGCCTCACTCAGCCCCCTGCCTG
GACCCCTACTCAACCACAAGGCCCAGCTGCCATCATGGAAGACCCTGATG
GGCTGAGGGAGCTCCTAGAAGACTGTTGGGATGCAGACCCAGAAGCACGG
CTGACAGCTGAGTGTGTACAGCAGCGCCTGGCTGCCTTGGCCCATCCTCA
AGAGAGCCACCCCTTTCCAGAGAGCTGTCCACGTGGCTGCCCACCTCTCT
GCCCAGAAGACTGTACTTCAATTCCTGCCCCTACCATCCTCCCCTGTAGG
CCTCAGCGGAGTGCCTGCCACTTCAGCGTTCAGCAAGGCCCTTGTTCCAG
GAATCCTCAGCCTGCCTGTACCCTTTCTCCTGTG

[0371] A nucleic acid sequence encoding a processed soluble (extracellular) human MISRII polypeptide (isoform 3) is as follows:

(SEQ ID NO: 82)

CCCCCAAACAGGCGAACCTGTGTGTTCTTTGAGGCCCCTGGAGTGCGGGG
AAGCACAAAGACACTGGGAGAGCTGCTAGATACAGGCACAGAGCTCCCCA
GAGCTATCCGCTGCCTCTACAGCCGCTGCTGCTTTGGGATCTGGAACCTG
ACCCAAGACCGGGCACAGGTGGAAATGCAAGGATGCCGAGACAGTGATGA
GCCAGGCTGTGAGTCCCTCCACTGTGACCCAAGTCCCCGAGCCCACCCCA
GCCCTGGCTCCACTCTCTTCACCTGCTCCTGTGGCACTGACTTCTGCAAT
GCCAATTACAGCCATCTGCCTCCTCCAGGGAGCCCTGGGACTCCTGGCTC
CCAGGGTCCCCAGGCTGCCCCAGGTGAGTCCATCTGGATGGCACTG

[0372] In certain embodiments, the disclosure relates to heteromultimers that comprise at least one MISRII polypeptide, which includes fragments, functional variants, and modified forms thereof. Preferably, MISRII polypeptides for use in accordance with the disclosure (e.g., heteromultimers comprising a MISRII polypeptide and uses thereof) are soluble (e.g., an extracellular domain of MISRII). In other preferred embodiments, MISRII polypeptides for use in accordance with the disclosure bind to and/or inhibit (antagonize) activity (e.g., Smad signaling) of one or more TGF-beta superfamily ligands. In some embodiments, heteromultimers of the disclosure comprise at least one MISRII polypeptide that is at least 70%, 75%, 80%, 85%, 90%, 91%, 92%, 93%, 94%, 95%, 96%, 97%, 98%, 99%, or 100% identical to the amino acid sequence of SEQ ID NOs: 50, 51, 75, 76, 79, or 80. In some embodiments, heteromultimers of the disclosure comprise at least one MISRII polypeptide that is at least 70%, 75%, 80%, 85%, 90%, 91%, 92%, 93%, 94%, 95%, 96%, 97%, 98%, 99%, or 100% identical to a polypeptide that begins at any one of amino acids of 18-24 (e.g., amino acid residues 18, 19, 20, 21, 22, 23, or 24) of SEQ ID NO: 50, and ends at any one of amino acids 116-149 (e.g., amino acid residues 116, 117, 118, 119, 120, 121, 122, 123, 124, 125, 126, 127, 128, 129, 130, 131, 132, 133, 134, 135, 136, 137, 138, 139, 140, 141, 142, 143, 144, 145, 146, 147, 148, or 149) of SEQ ID NO: 50. In some embodiments, heteromultimers of the disclosure comprise at least one MISRII polypeptide that is at least 70%, 75%, 80%, 85%, 90%, 91%, 92%, 93%, 94%, 95%, 96%, 97%, 98%, 99%, or 100% identical to amino acids of 18-116 of SEQ ID NO: 50. In some embodiments, heteromultimers of the disclosure comprise at least one MISRII polypeptide that is at least 70%, 75%, 80%, 85%, 90%, 91%, 92%, 93%, 94%, 95%, 96%, 97%, 98%, 99%, or 100% identical to amino acids of 18-149 of SEQ ID NO: 50. In some embodiments, heteromultimers of the disclosure comprise at least one MISRII polypeptide that is at least 70%, 75%, 80%, 85%, 90%, 91%, 92%, 93%, 94%, 95%, 96%, 97%, 98%, 99%, or 100% identical to amino acids of 24-116 of SEQ ID NO: 50. In some embodiments, heteromultimers of the disclosure comprise at least one MISRII polypeptide that is at least 70%, 75%, 80%, 85%, 90%, 91%, 92%, 93%, 94%, 95%, 96%, 97%, 98%, 99%, or 100% identical to amino acids of 24-149 of SEQ ID NO: 50. In some embodiments, heteromultimers of the disclosure comprise at least one MISRII polypeptide that is at least 70%, 75%, 80%, 85%, 90%, 91%, 92%, 93%, 94%, 95%, 96%, 97%, 98%, 99%, or 100% identical to a polypeptide that begins at any one of amino acids of 18-24 (e.g., amino acid residues 18, 19, 20, 21, 22, 23, or 24) of SEQ ID NO: 75, and ends at any one of amino acids 116-149 (e.g., amino acid residues 116, 117, 118, 119, 120, 121, 122, 123, 124, 125, 126, 127, 128, 129, 130, 131, 132, 133, 134, 135, 136, 137, 138, 139, 140, 141, 142, 143, 144, 145, 146, 147, 148, or 149) of SEQ ID NO: 75. In some embodiments, heteromultimers of the disclosure comprise at least one MISRII polypeptide that is at least 70%, 75%, 80%, 85%, 90%, 91%, 92%, 93%, 94%, 95%, 96%, 97%, 98%, 99%, or 100% identical to amino acids of 18-116 of SEQ ID NO: 75. In some embodiments, heteromultimers of the disclosure comprise at least one MISRII polypeptide that is at least 70%, 75%, 80%, 85%, 90%, 91%, 92%, 93%, 94%, 95%, 96%, 97%, 98%, 99%, or 100% identical to amino acids of 18-149 of SEQ ID NO: 75. In some embodiments, heteromultimers of the disclosure comprise at least one MISRII polypeptide that is at least 70%, 75%, 80%, 85%, 90%, 91%, 92%, 93%, 94%, 95%, 96%, 97%, 98%, 99%, or 100% identical to amino acids of 24-116 of SEQ ID NO: 75. In some embodiments, heteromultimers of the disclosure comprise at least one MISRII polypeptide that is at least 70%, 75%, 80%, 85%, 90%, 91%, 92%, 93%, 94%, 95%, 96%, 97%, 98%, 99%, or 100% identical to amino acids of 24-149 of SEQ ID NO: 75. In some embodiments, heteromultimers of the disclosure comprise at least one MISRII polypeptide that is at least 70%, 75%, 80%, 85%, 90%, 91%, 92%, 93%, 94%, 95%, 96%, 97%, 98%, 99%, or 100% identical to a polypeptide that begins at any one of amino acids of 18-24 (e.g., amino acid residues 18, 19, 20, 21, 22, 23, or 24) of SEQ ID NO: 50, and ends at any one of amino acids 116-149 (e.g., amino acid residues 116, 117, 118, 119, 120, 121, 122, 123, 124, 125, 126, 127, 128, 129, 130, 131, 132, 133, 134, 135, 136, 137, 138, 139, 140, 141, 142, 143, 144, 145, 146, 147, 148, or 149) of SEQ ID NO: 79. In some embodiments, heteromultimers of the disclosure comprise at least one MISRII polypeptide that is at least 70%, 75%, 80%, 85%, 90%, 91%, 92%, 93%, 94%, 95%, 96%, 97%, 98%, 99%, or 100% identical to amino acids of 18-116 of SEQ ID NO: 79. In some embodiments, heteromultimers of the disclosure comprise at least one MISRII polypeptide that is at least 70%, 75%, 80%, 85%, 90%, 91%, 92%, 93%, 94%, 95%, 96%, 97%, 98%, 99%, or 100% identical to amino acids of 18-149 of SEQ ID NO: 79. In some embodiments, heteromultimers of the disclosure comprise at least one MISRII polypeptide that is at least 70%, 75%, 80%, 85%, 90%, 91%, 92%, 93%, 94%, 95%, 96%, 97%, 98%, 99%, or 100% identical to amino acids of 24-116 of SEQ ID NO: 79. In some embodiments, heteromultimers of the disclosure comprise at least one MISRII polypeptide that is at least 70%, 75%, 80%, 85%, 90%, 91%, 92%, 93%, 94%, 95%, 96%, 97%, 98%, 99%, or 100% identical to amino acids of 24-149 of SEQ ID NO: 79.

[0373] In certain aspects, the present disclosure relates to heteromultimers that comprise an ALK1 polypeptide. As used herein, the term “ALK1” refers to a family of activin receptor-like kinase-1 proteins from any species and variants derived from such ALK1 proteins by mutagenesis or other modification. Reference to ALK1 herein is understood to be a reference to any one of the currently identified forms. Members of the ALK1 family are generally transmembrane proteins, composed of a ligand-binding extracellular domain with a cysteine-rich region, a transmembrane domain, and a cytoplasmic domain with predicted serine/threonine kinase activity.

[0374] The term “ALK1 polypeptide” includes polypeptides comprising any naturally occurring polypeptide of an ALK1 family member as well as any variants thereof (including mutants, fragments, fusions, and peptidomimetic forms) that retain a useful activity.

[0375] A human ALK1 precursor protein sequence (NCBI Ref Seq NP_000011.2) is as follows:

| (SEQ ID NO: 14) | |
|---|---|
| 1 | MTLGSPRKGL LMLLMALVTQ GDPVKPSRGP LVTCTCESPH CKGPTCRGAW |
| 51 | CTVVLVREEG RHPQEHRGCG NLHRELCRGR PTEFVNHYCC DSHLCNHNVS |
| 101 | LVLEATQPPS EQPGTDGQLA LILGPVLALL ALVALGVLGL WHVRRRQEKQ |
| 151 | RGLHSELGES SLILKASEQG DSMLGDLLDS DCTTGSGSGL PFLVQRTVAR |
| 201 | QVALVECVGK GRYGEVWRGL WHGESVAVKI FSSRDEQSWF RETEIYNTVL |
| 251 | LRHDNILGFI ASDMTSRNSS TQLWLITHYH EHGSLYDFLQ RQTLEPHLAL |
| 301 | RLAVSAACGL AHLHVEIFGT QGKPAIAHRD FKSRNVLVKS NLQCCIADLG |
| 351 | LAVMHSQGSD YLDIGNNPRV GTKRYMAPEV LDEQIRTDCF ESYKWTDIWA |
| 401 | FGLVLWEIAR RTIVNGIVED YRPPFYDVVP NDPSFEDMKK VVCVDQQTPT |
| 451 | IPNRLAADPV LSGLAQMMRE CWYPNPSARL TALRIKKTLQ KISNSPEKPK |
| 501 | VIQ |

[0376] The signal peptide is indicated by a single underline and the extracellular domain is indicated in bold font.

[0377] A processed extracellular ALK1 polypeptide sequence is as follows:

(SEQ ID NO: 15)

DPVKPSRGPLVTCTCESPHCKGPTCRGAWCTVVLVREEGRHPQEHRGCGN
LHRELCRGRPTEFVNHYCCDSHLCNHNVSLVLEATQPPSEQPGTDGQ

[0378] A nucleic acid sequence encoding human ALK1 precursor protein is shown below (SEQ ID NO: 16), corresponding to nucleotides 284-1792 of Genbank Reference Sequence NM_000020.2. The signal sequence is underlined.

(SEQ ID NO: 16)

ATGACCTTGGGCTCCCCCAGGAAAGGCCTTCTGATGCTGCTGATGGCCTT
GGTGACCCAGGGAGACCCTGTGAAGCCGTCTCGGGGCCCGCTGGTGACCT
GCACGTGTGAGAGCCCACATTGCAAGGGGCCTACCTGCCGGGGGGCCTGG
TGCACAGTAGTGCTGGTGCGGGAGGAGGGGAGGCACCCCCAGGAACATCG
GGGCTGCGGGAACTTGCACAGGGAGCTCTGCAGGGGGCGCCCCACCGAGT
TCGTCAACCACTACTGCTGCGACAGCCACCTCTGCAACCACAACGTGTCC
CTGGTGCTGGAGGCCACCCAACCTCCTTCGGAGCAGCCGGGAACAGATGG
CCAGCTGGCCCTGATCCTGGGCCCCGTGCTGGCCTTGCTGGCCCTGGTGG
CCCTGGGTGTCCTGGGCCTGTGGCATGTCCGACGGAGGCAGGAGAAGCAG
CGTGGCCTGCACAGCGAGCTGGGAGAGTCCAGTCTCATCCTGAAAGCATC
TGAGCAGGGCGACAGCATGTTGGGGGACCTCCTGGACAGTGACTGCACCA
CAGGGAGTGGCTCAGGGCTCCCCTTCCTGGTGCAGAGGACAGTGGCACGG
CAGGTTGCCTTGGTGGAGTGTGTGGGAAAAGGCCGCTATGGCGAAGTGTG
GCGGGGCTTGTGGCACGGTGAGAGTGTGGCCGTCAAGATCTTCTCCTCGA
GGGATGAACAGTCCTGGTTCCGGGAGACTGAGATCTATAACACAGTGTTG
CTCAGACACGACAACATCCTAGGCTTCATCGCCTCAGACATGACCTCCCG
CAACTCGAGCACGCAGCTGTGGCTCATCACGCACTACCACGAGCACGGCT
CCCTCTACGACTTTCTGCAGAGACAGACGCTGGAGCCCCATCTGGCTCTG
AGGCTAGCTGTGTCCGCGGCATGCGGCCTGGCGCACCTGCACGTGGAGAT
CTTCGGTACACAGGGCAAACCAGCCATTGCCCACCGCGACTTCAAGAGCC
GCAATGTGCTGGTCAAGAGCAACCTGCAGTGTTGCATCGCCGACCTGGGC
CTGGCTGTGATGCACTCACAGGGCAGCGATTACCTGGACATCGGCAACAA
CCCGAGAGTGGGCACCAAGCGGTACATGGCACCCGAGGTGCTGGACGAGC
AGATCCGCACGGACTGCTTTGAGTCCTACAAGTGGACTGACATCTGGGCC
TTTGGCCTGGTGCTGTGGGAGATTGCCCGCCGGACCATCGTGAATGGCAT
CGTGGAGGACTATAGACCACCCTTCTATGATGTGGTGCCCAATGACCCCA
GCTTTGAGGACATGAAGAAGGTGGTGTGTGTGGATCAGCAGACCCCCACC
ATCCCTAACCGGCTGGCTGCAGACCCGGTCCTCTCAGGCCTAGCTCAGAT
GATGCGGGAGTGCTGGTACCCAAACCCCTCTGCCCGACTCACCGCGCTGC
GGATCAAGAAGACACTACAAAAAATTAGCAACAGTCCAGAGAAGCCTAAA
GTGATTCAA

[0379] A nucleic acid sequence encoding a processed extracellular ALK1 polypeptide is as follows:

(SEQ ID NO: 17)

GACCCTGTGAAGCCGTCTCGGGGCCCGCTGGTGACCTGCACGTGTGAGAG
CCCACATTGCAAGGGGCCTACCTGCCGGGGGGCCTGGTGCACAGTAGTGC
TGGTGCGGGAGGAGGGGAGGCACCCCCAGGAACATCGGGGCTGCGGGAAC
TTGCACAGGGAGCTCTGCAGGGGGCGCCCCACCGAGTTCGTCAACCACTA
CTGCTGCGACAGCCACCTCTGCAACCACAACGTGTCCCTGGTGCTGGAGG
CCACCCAACCTCCTTCGGAGCAGCCGGGAACAGATGGCCAG

[0380] In certain embodiments, the disclosure relates to heteromultimers that comprise at least one ALK1 polypeptide, which includes fragments, functional variants, and modified forms thereof. Preferably, ALK1 polypeptides for use in accordance with the disclosure (e.g., heteromultimers comprising an ALK1 polypeptide and uses thereof) are soluble (e.g., an extracellular domain of ALK1). In other preferred embodiments, ALK1 polypeptides for use in accordance with the disclosure bind to and/or inhibit (antagonize) activity (e.g., Smad signaling) of one or more TGF-beta superfamily ligands. In some embodiments, heteromultimers of the disclosure comprise at least one ALK1 polypeptide that is at least 70%, 75%, 80%, 85%, 90%, 91%, 92%, 93%, 94%, 95%, 96%, 97%, 98%, 99%, or 100% identical to the amino acid sequence of SEQ ID NOs: 14 or 15. In some embodiments, heteromultimers of the disclosure comprise at least one ALK1 polypeptide that is at least 70%, 75%, 80%, 85%, 90%, 91%, 92%, 93%, 94%, 95%, 96%, 97%, 98%, 99%, or 100% identical to a polypeptide that begins at any one of amino acids of 22-34 (e.g., amino acid residues 22, 23, 24, 25, 26, 27, 28, 29, 30, 31, 32, 33, or 34) of SEQ ID NO: 14, and ends at any one of amino acids 95-118 (e.g., amino acid residues 95, 96, 97, 98, 99, 100, 101, 102, 103, 104, 105, 106, 107, 108, 109, 110, 111, 112, 113, 114, 115, 116, 117, or 118) of SEQ ID NO: 14. In some embodiments, heteromultimers of the disclosure comprise at least one ALK1 polypeptide that is at least 70%, 75%, 80%, 85%, 90%, 91%, 92%, 93%, 94%, 95%, 96%, 97%, 98%, 99%, or 100% identical to amino acids of 22-95 of SEQ ID NO: 14. In some embodiments, heteromultimers of the disclosure comprise at least one ALK1 polypeptide that is at least 70%, 75%, 80%, 85%, 90%, 91%, 92%, 93%, 94%, 95%, 96%, 97%, 98%, 99%, or 100% identical to amino acids of 22-118 of SEQ ID NO: 14. In some embodiments, heteromultimers of the disclosure comprise at least one ALK1 polypeptide that is at least 70%, 75%, 80%, 85%, 90%, 91%, 92%, 93%, 94%, 95%, 96%, 97%, 98%, 99%, or 100% identical to amino acids of 34-95 of SEQ ID NO: 14. In some embodiments, heteromultimers of the disclosure comprise at least one ALK1 polypeptide that is at least 70%, 75%, 80%, 85%, 90%, 91%, 92%, 93%, 94%, 95%, 96%, 97%, 98%, 99%, or 100% identical to amino acids of 34-118 of SEQ ID NO: 14.

[0381] In certain aspects, the present disclosure relates to heteromultimers that comprise an ALK2 polypeptide. As used herein, the term “ALK2” refers to a family of activin receptor-like kinase-2 proteins from any species and variants derived from such ALK2 proteins by mutagenesis or other modification. Reference to ALK2 herein is understood to be a reference to any one of the currently identified forms. Members of the ALK2 family are generally transmembrane proteins, composed of a ligand-binding extracellular domain with a cysteine-rich region, a transmembrane domain, and a cytoplasmic domain with predicted serine/threonine kinase activity.

[0382] The term “ALK2 polypeptide” includes polypeptides comprising any naturally occurring polypeptide of an ALK2 family member as well as any variants thereof (including mutants, fragments, fusions, and peptidomimetic forms) that retain a useful activity.

[0383] A human ALK2 precursor protein sequence (NCBI Ref Seq NP_001096.1) is as follows:

| (SEQ ID NO: 18) | |
|---|---|
| 1 | MVDGVMILPV LIMIALPSPS MEDEKPKVNP KLYMCVCEGL SCGNEDHCEG |
| 51 | QQCFSSLSIN DGFHVYQKGC FQVYEQGKMT CKTPPSPGQA VECCQGDWCN |
| 101 | RNITAQLPTK GKSFPGTQNF HLEVGLIILS VVFAVCLLAC LLGVALRKFK |
| 151 | RRNQERLNPR DVEYGTIEGL ITTNVGDSTL ADLLDHSCTS GSGSGLPFLV |
| 201 | QRTVARQITL LECVGKGRYG EVWRGSWQGE NVAVKIFSSR DEKSWFRETE |
| 251 | LYNTVMLRHE NILGFIASDM TSRHSSTQLW LITHYHEMGS LYDYLQLTTL |
| 301 | DTVSCLRIVL SIASGLAHLH IEIFGTQGKP AIAHRDLKSK NILVKKNGQC |
| 351 | CIADLGLAVM HSQSTNQLDV GNNPRVGTKR YMAPEVLDET IQVDCFDSYK |
| 401 | RVDIWAFGLV LWEVARRMVS NGIVEDYKPP FYDVVPNDPS FEDMRKVVCV |
| 451 | DQQRPNIPNR WFSDPTLTSL AKLMKECWYQ NPSARLTALR IKKTLTKIDN |
| 501 | SLDKLKTDC |

[0384] The signal peptide is indicated by a single underline and the extracellular domain is indicated in bold font.

[0385] A processed extracellular ALK2 polypeptide sequence is as follows:

(SEQ ID NO: 19)

MEDEKPKVNPKLYMCVCEGLSCGNEDHCEGQQCFSSLSINDGFHVYQKGC
FQVYEQGKMTCKTPPSPGQAVECCQGDWCNRNITAQLPTKGKSFPGTQNF
HLE

[0386] A nucleic acid sequence encoding human ALK2 precursor protein is shown below (SEQ ID NO: 20), corresponding to nucleotides 431-1957 of Genbank Reference Sequence NM_001105.4. The signal sequence is underlined.

(SEQ ID NO: 20)

ATGGTAGATGGAGTGATGATTCTTCCTGTGCTTATCATGATTGCTCTCCC
CTCCCCTAGTATGGAAGATGAGAAGCCCAAGGTCAACCCCAAACTCTACA
TGTGTGTGTGTGAAGGTCTCTCCTGCGGTAATGAGGACCACTGTGAAGGC
CAGCAGTGCTTTTCCTCACTGAGCATCAACGATGGCTTCCACGTCTACCA
GAAAGGCTGCTTCCAGGTTTATGAGCAGGGAAAGATGACCTGTAAGACCC
CGCCGTCCCCTGGCCAAGCCGTGGAGTGCTGCCAAGGGGACTGGTGTAAC
AGGAACATCACGGCCCAGCTGCCCACTAAAGGAAAATCCTTCCCTGGAAC
ACAGAATTTCCACTTGGAGGTTGGCCTCATTATTCTCTCTGTAGTGTTCG
CAGTATGTCTTTTAGCCTGCCTGCTGGGAGTTGCTCTCCGAAAATTTAAA
AGGCGCAACCAAGAACGCCTCAATCCCCGAGACGTGGAGTATGGCACTAT
CGAAGGGCTCATCACCACCAATGTTGGAGACAGCACTTTAGCAGATTTAT
TGGATCATTCGTGTACATCAGGAAGTGGCTCTGGTCTTCCTTTTCTGGTA
CAAAGAACAGTGGCTCGCCAGATTACACTGTTGGAGTGTGTCGGGAAAGG
CAGGTATGGTGAGGTGTGGAGGGGCAGCTGGCAAGGGGAGAATGTTGCCG
TGAAGATCTTCTCCTCCCGTGATGAGAAGTCATGGTTCAGGGAAACGGAA
TTGTACAACACTGTGATGCTGAGGCATGAAAATATCTTAGGTTTCATTGC
TTCAGACATGACATCAAGACACTCCAGTACCCAGCTGTGGTTAATTACAC
ATTATCATGAAATGGGATCGTTGTACGACTATCTTCAGCTTACTACTCTG
GATACAGTTAGCTGCCTTCGAATAGTGCTGTCCATAGCTAGTGGTCTTGC
ACATTTGCACATAGAGATATTTGGGACCCAAGGGAAACCAGCCATTGCCC
ATCGAGATTTAAAGAGCAAAAATATTCTGGTTAAGAAGAATGGACAGTGT
TGCATAGCAGATTTGGGCCTGGCAGTCATGCATTCCCAGAGCACCAATCA
GCTTGATGTGGGGAACAATCCCCGTGTGGGCACCAAGCGCTACATGGCCC
CCGAAGTTCTAGATGAAACCATCCAGGTGGATTGTTTCGATTCTTATAAA
AGGGTCGATATTTGGGCCTTTGGACTTGTTTTGTGGGAAGTGGCCAGGCG
GATGGTGAGCAATGGTATAGTGGAGGATTACAAGCCACCGTTCTACGATG
TGGTTCCCAATGACCCAAGTTTTGAAGATATGAGGAAGGTAGTCTGTGTG
GATCAACAAAGGCCAAACATACCCAACAGATGGTTCTCAGACCCGACATT
AACCTCTCTGGCCAAGCTAATGAAAGAATGCTGGTATCAAAATCCATCCG
CAAGACTCACAGCACTGCGTATCAAAAAGACTTTGACCAAAATTGATAAT
TCCCTCGACAAATTGAAAACTGACTGT

[0387] A nucleic acid sequence encoding an extracellular ALK2 polypeptide is as follows:

(SEQ ID NO: 21)

ATGGAAGATGAGAAGCCCAAGGTCAACCCCAAACTCTACATGTGTGTGTG
TGAAGGTCTCTCCTGCGGTAATGAGGACCACTGTGAAGGCCAGCAGTGCT
TTTCCTCACTGAGCATCAACGATGGCTTCCACGTCTACCAGAAAGGCTGC
TTCCAGGTTTATGAGCAGGGAAAGATGACCTGTAAGACCCCGCCGTCCCC
TGGCCAAGCCGTGGAGTGCTGCCAAGGGGACTGGTGTAACAGGAACATCA
CGGCCCAGCTGCCCACTAAAGGAAAATCCTTCCCTGGAACACAGAATTTC
CACTTGGAG

[0388] In certain embodiments, the disclosure relates to heteromultimers that comprise at least one ALK2 polypeptide, which includes fragments, functional variants, and modified forms thereof. Preferably, ALK2 polypeptides for use in accordance with the disclosure (e.g., heteromultimers comprising an ALK2 polypeptide and uses thereof) are soluble (e.g., an extracellular domain of ALK2). In other preferred embodiments, ALK2 polypeptides for use in accordance with the disclosure bind to and/or inhibit (antagonize) activity (e.g., Smad signaling) of one or more TGF-beta superfamily ligands. In some embodiments, heteromultimers of the disclosure comprise at least one ALK2 polypeptide that is at least 70%, 75%, 80%, 85%, 90%, 91%, 92%, 93%, 94%, 95%, 96%, 97%, 98%, 99%, or 100% identical to the amino acid sequence of SEQ ID NO: 18 or 19. In some embodiments, heteromultimers of the disclosure consist or consist essentially of at least one ALK2 polypeptide that is at least 70%, 75%, 80%, 85%, 90%, 95%, 97%, 98%, or 99% identical to the amino acid sequence of SEQ ID NO: 18 or 19. In some embodiments, heteromultimers of the disclosure comprise at least one ALK2 polypeptide that is at least 70%, 75%, 80%, 85%, 90%, 91%, 92%, 93%, 94%, 95%, 96%, 97%, 98%, 99%, or 100% identical to a polypeptide that begins at any one of amino acids of 21-35 (e.g., amino acid residues 21, 22, 23, 24, 25, 26, 27, 28, 29, 30, 31, 32, 33, 34, or 35) of SEQ ID NO: 18, and ends at any one of amino acids 99-123 (e.g., amino acid residues 99, 100, 101, 102, 103, 104, 105, 106, 107, 108, 109, 110, 111, 112, 113, 114, 115, 116, 117, 118, 119, 120, 121, 122, or 123) of SEQ ID NO: 18. In some embodiments, heteromultimers of the disclosure comprise at least one ALK2 polypeptide that is at least 70%, 75%, 80%, 85%, 90%, 91%, 92%, 93%, 94%, 95%, 96%, 97%, 98%, 99%, or 100% identical to amino acids of 21-99 of SEQ ID NO: 18. In some embodiments, heteromultimers of the disclosure comprise at least one ALK2 polypeptide that is at least 70%, 75%, 80%, 85%, 90%, 91%, 92%, 93%, 94%, 95%, 96%, 97%, 98%, 99%, or 100% identical to amino acids of 21-123 of SEQ ID NO: 18. In some embodiments, heteromultimers of the disclosure comprise at least one ALK2 polypeptide that is at least 70%, 75%, 80%, 85%, 90%, 91%, 92%, 93%, 94%, 95%, 96%, 97%, 98%, 99%, or 100% identical to amino acids of 35-99 of SEQ ID NO: 18. In some embodiments, heteromultimers of the disclosure comprise at least one ALK2 polypeptide that is at least 70%, 75%, 80%, 85%, 90%, 91%, 92%, 93%, 94%, 95%, 96%, 97%, 98%, 99%, or 100% identical to amino acids of 35-123 of SEQ ID NO: 18.

[0389] In certain aspects, the present disclosure relates to heteromultimers that comprise an ALK3 polypeptide. As used herein, the term “ALK3” refers to a family of activin receptor-like kinase-3 proteins from any species and variants derived from such ALK3 proteins by mutagenesis or other modification. Reference to ALK3 herein is understood to be a reference to any one of the currently identified forms. Members of the ALK3 family are generally transmembrane proteins, composed of a ligand-binding extracellular domain with a cysteine-rich region, a transmembrane domain, and a cytoplasmic domain with predicted serine/threonine kinase activity.

[0390] The term “ALK3 polypeptide” includes polypeptides comprising any naturally occurring polypeptide of an ALK3 family member as well as any variants thereof (including mutants, fragments, fusions, and peptidomimetic forms) that retain a useful activity.

[0391] A human ALK3 precursor protein sequence (NCBI Ref Seq NP_004320.2) is as follows:

| (SEQ ID NO: 22) | |
|---|---|
| 1 | MPQLYIYIRL LGAYLFIISR VQGQNLDSML HGTGMKSDSD QKKSENGVTL APEDTLPFLK |
| 61 | CYCSGHCPDD AINNTCITNG HCFAIIEEDD QGETTLASGC MKYEGSDFQC KDSPKAQLRR |
| 121 | TIECCRTNLC NQYLQPTLPP VVIGPFFDGS IRWLVLLISM AVCIIAMIIF SSCFCYKHYC |
| 181 | KSISSRRRYN RDLEQDEAFI PVGESLKDLI DQSQSSGSGS GLPLLVQRTI AKQIQMVRQV |
| 241 | GKGRYGEVWM GKWRGEKVAV KVFFTTEEAS WFRETEIYQT VLMRHENILG FIAADIKGTG |
| 301 | SWTQLYLITD YHENGSLYDF LKCATLDTRA LLKLAYSAAC GLCHLHTEIY GTQGKPAIAH |
| 361 | RDLKSKNILI KKNGSCCIAD LGLAVKFNSD TNEVDVPLNT RVGTKRYMAP EVLDESLNKN |
| 421 | HFQPYIMADI YSFGLIIWEM ARRCITGGIV EEYQLPYYNM VPSDPSYEDM REVVCVKRLR |
| 481 | PIVSNRWNSD ECLRAVLKLM SECWAHNPAS RLTALRIKKT LAKMVESQDV KI |

[0392] The signal peptide is indicated by a single underline and the extracellular domain is indicated in bold font.

[0393] A processed extracellular ALK3 polypeptide sequence is as follows:

| (SEQ ID NO: 23) | |
|---|---|
| 1 | QNLDSMLHGT GMKSDSDQKK SENGVTLAPE DTLPFLKCYC SGHCPDDAIN NTCITNGHCF |
| 61 | AIIEEDDQGE TTLASGCMKY EGSDFQCKDS PKAQLRRTIE CCRTNLCNQY LQPTLPPVVI |
| 121 | GPFFDGSIR |

[0394] A nucleic acid sequence encoding human ALK3 precursor protein is shown below (SEQ ID NO: 24), corresponding to nucleotides 549-2144 of Genbank Reference Sequence NM_004329.2. The signal sequence is underlined and the extracellular domain is indicated in bold font.

| (SEQ ID NO: 24) | |
|---|---|
| 1 | ATGCCTCAGC TATACATTTA CATCAGATTA TTGGGAGCCT ATTTGTTCAT |
| | CATTTCTCGT |
| 61 | GTTCAAGGAC AGAATCTGGA TAGTATGCTT CATGGCACTG GGATGAAATC |
| | AGACTCCGAC |
| 121 | CAGAAAAAGT CAGAAAATGG AGTAACCTTA GCACCAGAGG ATACCTTGCC |
| | TTTTTTAAAG |
| 181 | TGCTATTGCT CAGGGCACTG TCCAGATGAT GCTATTAATA ACACATGCAT |
| | AACTAATGGA |
| 241 | CATTGCTTTG CCATCATAGA AGAAGATGAC CAGGGAGAAA CCACATTAGC |
| | TTCAGGGTGT |
| 301 | ATGAAATATG AAGGATCTGA TTTTCAGTGC AAAGATTCTC CAAAAGCCCA |
| | GCTACGCCGG |
| 361 | ACAATAGAAT GTTGTCGGAC CAATTTATGT AACCAGTATT TGCAACCCAC |
| | ACTGCCCCCT |
| 421 | GTTGTCATAG GTCCGTTTTT TGATGGCAGC ATTCGATGGC TGGTTTTGCT |
| | CATTTCTATG |
| 481 | GCTGTCTGCA TAATTGCTAT GATCATCTTC TCCAGCTGCT TTTGTTACAA |
| | ACATTATTGC |
| 541 | AAGAGCATCT CAAGCAGACG TCGTTACAAT CGTGATTTGG AACAGGATGA |
| | AGCATTTATT |
| 601 | CCAGTTGGAG AATCACTAAA AGACCTTATT GACCAGTCAC AAAGTTCTGG |
| | TAGTGGGTCT |
| 661 | GGACTACCTT TATTGGTTCA GCGAACTATT GCCAAACAGA TTCAGATGGT |
| | CCGGCAAGTT |
| 721 | GGTAAAGGCC GATATGGAGA AGTATGGATG GGCAAATGGC GTGGCGAAAA |
| | AGTGGCGGTG |
| 781 | AAAGTATTCT TTACCACTGA AGAAGCCAGC TGGTTTCGAG AAACAGAAAT |
| | CTACCAAACT |
| 841 | GTGCTAATGC GCCATGAAAA CATACTTGGT TTCATAGCGG CAGACATTAA |
| | AGGTACAGGT |
| 901 | TCCTGGACTC AGCTCTATTT GATTACTGAT TACCATGAAA ATGGATCTCT |
| | CTATGACTTC |
| 961 | CTGAAATGTG CTACACTGGA CACCAGAGCC CTGCTTAAAT TGGCTTATTC |
| | AGCTGCCTGT |
| 1021 | GGTCTGTGCC ACCTGCACAC AGAAATTTAT GGCACCCAAG GAAAGCCCGC |
| | AATTGCTCAT |
| 1081 | CGAGACCTAA AGAGCAAAAA CATCCTCATC AAGAAAAATG GGAGTTGCTG |
| | CATTGCTGAC |
| 1141 | CTGGGCCTTG CTGTTAAATT CAACAGTGAC ACAAATGAAG TTGATGTGCC |
| | CTTGAATACC |
| 1201 | AGGGTGGGCA CCAAACGCTA CATGGCTCCC GAAGTGCTGG ACGAAAGCCT |
| | GAACAAAAAC |
| 1261 | CACTTCCAGC CCTACATCAT GGCTGACATC TACAGCTTCG GCCTAATCAT |
| | TTGGGAGATG |
| 1321 | GCTCGTCGTT GTATCACAGG AGGGATCGTG GAAGAATACC AATTGCCATA |
| | TTACAACATG |
| 1381 | GTACCGAGTG ATCCGTCATA CGAAGATATG CGTGAGGTTG TGTGTGTCAA |
| | ACGTTTGCGG |
| 1441 | CCAATTGTGT CTAATCGGTG GAACAGTGAT GAATGTCTAC GAGCAGTTTT |
| | GAAGCTAATG |
| 1501 | TCAGAATGCT GGGCCCACAA TCCAGCCTCC AGACTCACAG CATTGAGAAT |
| | TAAGAAGACG |
| 1561 | CTTGCCAAGA TGGTTGAATC CCAAGATGTA AAAATC |

[0395] A nucleic acid sequence encoding an extracellular human ALK3 polypeptide is as follows:

| (SEQ ID NO: 25) | |
|---|---|
| 1 | CAGAATCTGG ATAGTATGCT TCATGGCACT GGGATGAAAT CAGACTCCGA |
| | CCAGAAAAAG |
| 61 | TCAGAAAATG GAGTAACCTT AGCACCAGAG GATACCTTGC CTTTTTTAAA |
| | GTGCTATTGC |
| 121 | TCAGGGCACT GTCCAGATGA TGCTATTAAT AACACATGCA TAACTAATGG |
| | ACATTGCTTT |
| 181 | GCCATCATAG AAGAAGATGA CCAGGGAGAA ACCACATTAG CTTCAGGGTG |
| | TATGAAATAT |
| 241 | GAAGGATCTG ATTTTCAGTG CAAAGATTCT CCAAAAGCCC AGCTACGCCG |
| | GACAATAGAA |
| 301 | TGTTGTCGGA CCAATTTATG TAACCAGTAT TTGCAACCCA CACTGCCCCC |
| | TGTTGTCATA |
| 361 | GGTCCGTTTT TTGATGGCAG CATTCGA |

[0396] In certain embodiments, the disclosure relates to heteromultimers that comprise at least one ALK3 polypeptide, which includes fragments, functional variants, and modified forms thereof. Preferably, ALK3 polypeptides for use in accordance with the disclosure (e.g., heteromultimers comprising an ALK3 polypeptide and uses thereof) are soluble (e.g., an extracellular domain of ALK3). In other preferred embodiments, ALK3 polypeptides for use in accordance with the disclosure bind to and/or inhibit (antagonize) activity (e.g., Smad signaling) of one or more TGF-beta superfamily ligands. In some embodiments, heteromultimers of the disclosure comprise at least one ALK3 polypeptide that is at least 70%, 75%, 80%, 85%, 90%, 91%, 92%, 93%, 94%, 95%, 96%, 97%, 98%, 99%, or 100% identical to the amino acid sequence of SEQ ID NOs: 22 or 23. In some embodiments, heteromultimers of the disclosure comprise at least one ALK3 polypeptide that is at least 70%, 75%, 80%, 85%, 90%, 91%, 92%, 93%, 94%, 95%, 96%, 97%, 98%, 99%, or 100% identical to a polypeptide that begins at any one of amino acids of 24-61 (e.g., amino acid residues 24, 25, 26, 27, 28, 29, 30, 31, 32, 33, 34, 35, 36, 37, 38, 39, 40, 41, 42, 43, 44, 45, 46, 47, 48, 49, 50, 51, 52, 53, 54, 55, 56, 57, 58, 59, 60, or 61) of SEQ ID NO: 22, and ends at any one of amino acids 130-152 (e.g., amino acid residues 130, 131, 132, 133, 134, 135, 136, 137, 138, 139, 140, 141, 142, 143, 144, 145, 146, 147, 148, 149, 150, 151, 152) of SEQ ID NO: 22. In some embodiments, heteromultimers of the disclosure comprise at least one ALK3 polypeptide that is at least 70%, 75%, 80%, 85%, 90%, 91%, 92%, 93%, 94%, 95%, 96%, 97%, 98%, 99%, or 100% identical to amino acids of 24-130 of SEQ ID NO: 22. In some embodiments, heteromultimers of the disclosure comprise at least one ALK3 polypeptide that is at least 70%, 75%, 80%, 85%, 90%, 91%, 92%, 93%, 94%, 95%, 96%, 97%, 98%, 99%, or 100% identical to amino acids of 24-152 of SEQ ID NO: 22. In some embodiments, heteromultimers of the disclosure comprise at least one ALK3 polypeptide that is at least 70%, 75%, 80%, 85%, 90%, 91%, 92%, 93%, 94%, 95%, 96%, 97%, 98%, 99%, or 100% identical to amino acids of 61-130 of SEQ ID NO: 22. In some embodiments, heteromultimers of the disclosure comprise at least one ALK3 polypeptide that is at least 70%, 75%, 80%, 85%, 90%, 91%, 92%, 93%, 94%, 95%, 96%, 97%, 98%, 99%, or 100% identical to amino acids of 61-152 of SEQ ID NO: 22.

[0397] In certain aspects, the present disclosure relates to heteromultimers that comprise an ALK4 polypeptide. As used herein, the term “ALK4” refers to a family of activin receptor-like kinase-4 proteins from any species and variants derived from such ALK4 proteins by mutagenesis or other modification. Reference to ALK4 herein is understood to be a reference to any one of the currently identified forms. Members of the ALK4 family are generally transmembrane proteins, composed of a ligand-binding extracellular domain with a cysteine-rich region, a transmembrane domain, and a cytoplasmic domain with predicted serine/threonine kinase activity.

[0398] The term “ALK4 polypeptide” includes polypeptides comprising any naturally occurring polypeptide of an ALK4 family member as well as any variants thereof (including mutants, fragments, fusions, and peptidomimetic forms) that retain a useful activity.

[0399] The human ALK4 precursor protein, isoform A sequence (NCBI Ref Seq NP_004293) is as follows:

| (SEQ ID NO: 26) | |
|---|---|
| 1 | MAESAGASSF FPLVVLLLAG SGGSGPRGVQ ALLCACTSCL QANYTCETDG |
| | ACMVSIFNLD |
| 61 | GMEHHVRTCI PKVELVPAGK PFYCLSSEDL RNTHCCYTDY CNRIDLRVPS |
| | GHLKEPEHPS |
| 121 | MWGPVELVGI IAGPVFLLFL IIIIVFLVIN YHQRVYHNRQ RLDMEDPSCE |
| | MCLSKDKTLQ |
| 181 | DLVYDLSTSG SGSGLPLFVQ RTVARTIVLQ EIIGKGRFGE VWRGRWRGGD |
| | VAVKIFSSRE |
| 241 | ERSWFREAEI YQTVMLRHEN ILGFIAADNK DNGTWTQLWL VSDYHEHGSL |
| | FDYLNRYTVT |
| 301 | IEGMIKLALS AASGLAHLHM EIVGTQGKPG IAHRDLKSKN ILVKKNGMCA |
| | IADLGLAVRH |
| 361 | DAVTDTIDIA PNQRVGTKRY MAPEVLDETI NMKHFDSFKC ADIYALGLVY |
| | WEIARRCNSG |
| 421 | GVHEEYQLPY YDLVPSDPSI EEMRKVVCDQ KLRPNIPNWW QSYEALRVMG |
| | KMMRECWYAN |
| 481 | GAARLTALRI KKTLSQLSVQ EDVKI |

[0400] The signal peptide is indicated by a single underline and the extracellular domain is indicated in bold font.

[0401] A processed extracellular human ALK4 polypeptide sequence is as follows:

(SEQ ID NO: 27)
SGPRGVQALLCACTSCLQANYTCETDGACMVSIFNLDGMEHHVRTCIPKV
ELVPAGKPFYCLSSEDLRNTHCCYTDYCNRIDLRVPSGHLKEPEHPSMWG
PVE

[0402] A nucleic acid sequence encoding the ALK4 precursor protein is shown below (SEQ ID NO: 28), corresponding to nucleotides 78-1592 of Genbank Reference Sequence NM_004302.4. The signal sequence is underlined and the extracellular domain is indicated in bold font.

(SEQ ID NO: 28)
ATGGCGGAGTCGGCCGGAGCCTCCTCCTTCTTCCCCCTTGTTGTCCTCCT
GCTCGCCGGCAGCGGCGGGTCCGGGCCCCGGGGGGTCCAGGCTCTGCTGT
GTGCGTGCACCAGCTGCCTCCAGGCCAACTACACGTGTGAGACAGATGGG
GCCTGCATGGTTTCCATTTTCAATCTGGATGGGATGGAGCACCATGTGCG
CACCTGCATCCCCAAAGTGGAGCTGGTCCCTGCCGGGAAGCCCTTCTACT
GCCTGAGCTCGGAGGACCTGCGCAACACCCACTGCTGCTACACTGACTAC
TGCAACAGGATCGACTTGAGGGTGCCCAGTGGTCACCTCAAGGAGCCTGA
GCACCCGTCCATGTGGGGCCCGGTGGAGCTGGTAGGCATCATCGCCGGCC
CGGTGTTCCTCCTGTTCCTCATCATCATCATTGTTTTCCTTGTCATTAAC
TATCATCAGCGTGTCTATCACAACCGCCAGAGACTGGACATGGAAGATCC
CTCATGTGAGATGTGTCTCTCCAAAGACAAGACGCTCCAGGATCTTGTCT
ACGATCTCTCCACCTCAGGGTCTGGCTCAGGGTTACCCCTCTTTGTCCAG
CGCACAGTGGCCCGAACCATCGTTTTACAAGAGATTATTGGCAAGGGTCG
GTTTGGGGAAGTATGGCGGGGCCGCTGGAGGGGTGGTGATGTGGCTGTGA
AAATATTCTCTTCTCGTGAAGAACGGTCTTGGTTCAGGGAAGCAGAGATA
TACCAGACGGTCATGCTGCGCCATGAAAACATCCTTGGATTTATTGCTGC
TGACAATAAAGATAATGGCACCTGGACACAGCTGTGGCTTGTTTCTGACT
ATCATGAGCACGGGTCCCTGTTTGATTATCTGAACCGGTACACAGTGACA
ATTGAGGGGATGATTAAGCTGGCCTTGTCTGCTGCTAGTGGGCTGGCACA
CCTGCACATGGAGATCGTGGGCACCCAAGGGAAGCCTGGAATTGCTCATC
GAGACTTAAAGTCAAAGAACATTCTGGTGAAGAAAAATGGCATGTGTGCC
ATAGCAGACCTGGGCCTGGCTGTCCGTCATGATGCAGTCACTGACACCAT
TGACATTGCCCCGAATCAGAGGGTGGGGACCAAACGATACATGGCCCCTG
AAGTACTTGATGAAACCATTAATATGAAACACTTTGACTCCTTTAAATGT
GCTGATATTTATGCCCTCGGGCTTGTATATTGGGAGATTGCTCGAAGATG
CAATTCTGGAGGAGTCCATGAAGAATATCAGCTGCCATATTACGACTTAG
TGCCCTCTGACCCTTCCATTGAGGAAATGCGAAAGGTTGTATGTGATCAG
AAGCTGCGTCCCAACATCCCCAACTGGTGGCAGAGTTATGAGGCACTGCG
GGTGATGGGGAAGATGATGCGAGAGTGTTGGTATGCCAACGGCGCAGCCC
GCCTGACGGCCCTGCGCATCAAGAAGACCCTCTCCCAGCTCAGCGTGCAG
GAAGACGTGAAGATC

[0403] A nucleic acid sequence encoding an extracellular ALK4 polypeptide is as follows:

(SEQ ID NO: 29)
TCCGGGCCCCGGGGGGTCCAGGCTCTGCTGTGTGCGTGCACCAGCTGCCT
CCAGGCCAACTACACGTGTGAGACAGATGGGGCCTGCATGGTTTCCATTT
TCAATCTGGATGGGATGGAGCACCATGTGCGCACCTGCATCCCCAAAGTG
GAGCTGGTCCCTGCCGGGAAGCCCTTCTACTGCCTGAGCTCGGAGGACCT
GCGCAACACCCACTGCTGCTACACTGACTACTGCAACAGGATCGACTTGA
GGGTGCCCAGTGGTCACCTCAAGGAGCCTGAGCACCCGTCCATGTGGGGC
CCGGTGGAG

[0404] An alternative isoform of human ALK4 precursor protein sequence, isoform C (NCBI Ref Seq NP_064733.3), is as follows:

| (SEQ ID NO: 83) | |
|---|---|
| 1 | MAESAGASSF FPLVVLLLAG SGGSGPRGVQ ALLCACTSCL QANYTCETDG |
| | ACMVSIFNLD |
| 61 | GMEHHVRTCI PKVELVPAGK PFYCLSSEDL RNTHCCYTDY CNRIDLRVPS |
| | GHLKEPEHPS |
| 121 | MWGPVELVGI IAGPVFLLFL IIIIVFLVIN YHQRVYHNRQ RLDMEDPSCE |
| | MCLSKDKTLQ |
| 181 | DLVYDLSTSG SGSGLPLFVQ RTVARTIVLQ EIIGKGRFGE VWRGRWRGGD |
| | VAVKIFSSRE |
| 241 | ERSWFREAEI YQTVMLRHEN ILGFIAADNK ADCSFLTLPW EVVMVSAAPK |
| | LRSLRLQYKG |
| 301 | GRGRARFLFP LNNGTWTQLW LVSDYHEHGS LFDYLNRYTV TIEGMIKLAL |
| | SAASGLAHLH |
| 361 | MEIVGTQGKP GIAHRDLKSK NILVKKNGMC AIADLGLAVR HDAVTDTIDI |
| | APNQRVGTKR |
| 421 | YMAPEVLDET INMKHFDSFK CADIYALGLV YWEIARRCNS GGVHEEYQLP |
| | YYDLVPSDPS |
| 481 | IEEMRKVVCD QKLRPNIPNW WQSYEALRVM GKMMRECWYA NGAARLTALR |
| | IKKTLSQLSV |
| 541 | QEDVKI |

[0405] The signal peptide is indicated by a single underline and the extracellular domain is indicated in bold font.

[0406] A processed extracellular ALK4 polypeptide sequence (isoform C) is as follows:

(SEQ ID NO: 84)
SGPRGVQALLCACTSCLQANYTCETDGACMVSIFNLDGMEHHVRTCIPKV
ELVPAGKPFYCLSSEDLRNTHCCYTDYCNRIDLRVPSGHLKEPEHPSMWG
PVE

[0407] A nucleic acid sequence encoding the ALK4 precursor protein (isoform C) is shown below (SEQ ID NO: 85), corresponding to nucleotides 78-1715 of Genbank Reference Sequence NM_020328.3. The signal sequence is underlined and the extracellular domain is indicated in bold font.

(SEQ ID NO: 85)
ATGGCGGAGTCGGCCGGAGCCTCCTCCTTCTTCCCCCTTGTTGTCCTCCT
GCTCGCCGGCAGCGGCGGGTCCGGGCCCCGGGGGGTCCAGGCTCTGCTGT
GTGCGTGCACCAGCTGCCTCCAGGCCAACTACACGTGTGAGACAGATGGG
GCCTGCATGGTTTCCATTTTCAATCTGGATGGGATGGAGCACCATGTGCG
CACCTGCATCCCCAAAGTGGAGCTGGTCCCTGCCGGGAAGCCCTTCTACT
GCCTGAGCTCGGAGGACCTGCGCAACACCCACTGCTGCTACACTGACTAC
TGCAACAGGATCGACTTGAGGGTGCCCAGTGGTCACCTCAAGGAGCCTGA
GCACCCGTCCATGTGGGGCCCGGTGGAGCTGGTAGGCATCATCGCCGGCC
CGGTGTTCCTCCTGTTCCTCATCATCATCATTGTTTTCCTTGTCATTAAC
TATCATCAGCGTGTCTATCACAACCGCCAGAGACTGGACATGGAAGATCC
CTCATGTGAGATGTGTCTCTCCAAAGACAAGACGCTCCAGGATCTTGTCT
ACGATCTCTCCACCTCAGGGTCTGGCTCAGGGTTACCCCTCTTTGTCCAG
CGCACAGTGGCCCGAACCATCGTTTTACAAGAGATTATTGGCAAGGGTCG
GTTTGGGGAAGTATGGCGGGGCCGCTGGAGGGGTGGTGATGTGGCTGTGA
AAATATTCTCTTCTCGTGAAGAACGGTCTTGGTTCAGGGAAGCAGAGATA
TACCAGACGGTCATGCTGCGCCATGAAAACATCCTTGGATTTATTGCTGC
TGACAATAAAGCAGACTGCTCATTCCTCACATTGCCATGGGAAGTTGTAA
TGGTCTCTGCTGCCCCCAAGCTGAGGAGCCTTAGACTCCAATACAAGGGA
GGAAGGGGAAGAGCAAGATTTTTATTCCCACTGAATAATGGCACCTGGAC
ACAGCTGTGGCTTGTTTCTGACTATCATGAGCACGGGTCCCTGTTTGATT
ATCTGAACCGGTACACAGTGACAATTGAGGGGATGATTAAGCTGGCCTTG
TCTGCTGCTAGTGGGCTGGCACACCTGCACATGGAGATCGTGGGCACCCA
AGGGAAGCCTGGAATTGCTCATCGAGACTTAAAGTCAAAGAACATTCTGG
TGAAGAAAAATGGCATGTGTGCCATAGCAGACCTGGGCCTGGCTGTCCGT
CATGATGCAGTCACTGACACCATTGACATTGCCCCGAATCAGAGGGTGGG
GACCAAACGATACATGGCCCCTGAAGTACTTGATGAAACCATTAATATGA
AACACTTTGACTCCTTTAAATGTGCTGATATTTATGCCCTCGGGCTTGTA
TATTGGGAGATTGCTCGAAGATGCAATTCTGGAGGAGTCCATGAAGAATA
TCAGCTGCCATATTACGACTTAGTGCCCTCTGACCCTTCCATTGAGGAAA
TGCGAAAGGTTGTATGTGATCAGAAGCTGCGTCCCAACATCCCCAACTGG
TGGCAGAGTTATGAGGCACTGCGGGTGATGGGGAAGATGATGCGAGAGTG
TTGGTATGCCAACGGCGCAGCCCGCCTGACGGCCCTGCGCATCAAGAAGA
CCCTCTCCCAGCTCAGCGTGCAGGAAGACGTGAAGATC

[0408] A nucleic acid sequence encoding an extracellular ALK4 polypeptide (isoform C) is as follows:

(SEQ ID NO: 86)
TCCGGGCCCCGGGGGGTCCAGGCTCTGCTGTGTGCGTGCACCAGCTGCCT
CCAGGCCAACTACACGTGTGAGACAGATGGGGCCTGCATGGTTTCCATTT
TCAATCTGGATGGGATGGAGCACCATGTGCGCACCTGCATCCCCAAAGTG
GAGCTGGTCCCTGCCGGGAAGCCCTTCTACTGCCTGAGCTCGGAGGACCT
GCGCAACACCCACTGCTGCTACACTGACTACTGCAACAGGATCGACTTGA
GGGTGCCCAGTGGTCACCTCAAGGAGCCTGAGCACCCGTCCATGTGGGGC
CCGGTGGAG

[0409] In certain embodiments, the disclosure relates to heteromultimers that comprise at least one ALK4 polypeptide, which includes fragments, functional variants, and modified forms thereof. Preferably, ALK4 polypeptides for use in accordance with the disclosure (e.g., heteromultimers comprising an ALK4 polypeptide and uses thereof) are soluble (e.g., an extracellular domain of ALK4). In other preferred embodiments, ALK4 polypeptides for use in accordance with the disclosure bind to and/or inhibit (antagonize) activity (e.g., Smad signaling) of one or more TGF-beta superfamily ligands. In some embodiments, heteromultimers of the disclosure comprise at least one ALK4 polypeptide that is at least 70%, 75%, 80%, 85%, 90%, 91%, 92%, 93%, 94%, 95%, 96%, 97%, 98%, 99%, or 100% identical to the amino acid sequence of SEQ ID NOs: 26, 27, 83, or 84. In some embodiments, heteromultimers of the disclosure comprise at least one ALK4 polypeptide that is at least 70%, 75%, 80%, 85%, 90%, 91%, 92%, 93%, 94%, 95%, 96%, 97%, 98%, 99%, or 100% identical to a polypeptide that begins at any one of amino acids of 24-34 (e.g., amino acid residues 24, 25, 26, 27, 28, 29, 30, 31, 32, 33, or 34) of SEQ ID NO: 26, and ends at any one of amino acids 101-126 (e.g., amino acid residues 101, 102, 103, 104, 105, 106, 107, 108, 109, 110, 111, 112, 113, 114, 115, 116, 117, 118, 119, 120, 121, 122, 123, 124, 125, or 126) of SEQ ID NO: 26. In some embodiments, heteromultimers of the disclosure comprise at least one ALK4 polypeptide that is at least 70%, 75%, 80%, 85%, 90%, 91%, 92%, 93%, 94%, 95%, 96%, 97%, 98%, 99%, or 100% identical to amino acids of 24-101 of SEQ ID NO: 26. In some embodiments, heteromultimers of the disclosure comprise at least one ALK4 polypeptide that is at least 70%, 75%, 80%, 85%, 90%, 91%, 92%, 93%, 94%, 95%, 96%, 97%, 98%, 99%, or 100% identical to amino acids of 24-126 of SEQ ID NO: 26. In some embodiments, heteromultimers of the disclosure comprise at least one ALK4 polypeptide that is at least 70%, 75%, 80%, 85%, 90%, 91%, 92%, 93%, 94%, 95%, 96%, 97%, 98%, 99%, or 100% identical to amino acids of 34-101 of SEQ ID NO: 26. In some embodiments, heteromultimers of the disclosure comprise at least one ALK4 polypeptide that is at least 70%, 75%, 80%, 85%, 90%, 91%, 92%, 93%, 94%, 95%, 96%, 97%, 98%, 99%, or 100% identical to amino acids of 34-126 of SEQ ID NO: 26. In some embodiments, heteromultimers of the disclosure comprise at least one ALK4 polypeptide that is at least 70%, 75%, 80%, 85%, 90%, 91%, 92%, 93%, 94%, 95%, 96%, 97%, 98%, 99%, or 100% identical to a polypeptide that begins at any one of amino acids of 24-34 (e.g., amino acid residues 24, 25, 26, 27, 28, 29, 30, 31, 32, 33, or 34) of SEQ ID NO: 83, and ends at any one of amino acids 101-126 (e.g., amino acid residues 101, 102, 103, 104, 105, 106, 107, 108, 109, 110, 111, 112, 113, 114, 115, 116, 117, 118, 119, 120, 121, 122, 123, 124, 125, or 126) of SEQ ID NO: 83. In some embodiments, heteromultimers of the disclosure comprise at least one ALK4 polypeptide that is at least 70%, 75%, 80%, 85%, 90%, 91%, 92%, 93%, 94%, 95%, 96%, 97%, 98%, 99%, or 100% identical to amino acids of 24-101 of SEQ ID NO: 83. In some embodiments, heteromultimers of the disclosure comprise at least one ALK4 polypeptide that is at least 70%, 75%, 80%, 85%, 90%, 91%, 92%, 93%, 94%, 95%, 96%, 97%, 98%, 99%, or 100% identical to amino acids of 24-126 of SEQ ID NO: 83. In some embodiments, heteromultimers of the disclosure comprise at least one ALK4 polypeptide that is at least 70%, 75%, 80%, 85%, 90%, 91%, 92%, 93%, 94%, 95%, 96%, 97%, 98%, 99%, or 100% identical to amino acids of 34-101 of SEQ ID NO: 83. In some embodiments, heteromultimers of the disclosure comprise at least one ALK4 polypeptide that is at least 70%, 75%, 80%, 85%, 90%, 91%, 92%, 93%, 94%, 95%, 96%, 97%, 98%, 99%, or 100% identical to amino acids of 34-126 of SEQ ID NO: 83.

[0410] In certain aspects, the present disclosure relates to heteromultimers that comprise an ALK5 polypeptide. As used herein, the term “ALK5” refers to a family of activin receptor-like kinase-5 proteins from any species and variants derived from such ALK4 proteins by mutagenesis or other modification. Reference to ALK5 herein is understood to be a reference to any one of the currently identified forms. Members of the ALK5 family are generally transmembrane proteins, composed of a ligand-binding extracellular domain with a cysteine-rich region, a transmembrane domain, and a cytoplasmic domain with predicted serine/threonine kinase activity.

[0411] The term “ALK5 polypeptide” includes polypeptides comprising any naturally occurring polypeptide of an ALK5 family member as well as any variants thereof (including mutants, fragments, fusions, and peptidomimetic forms) that retain a useful activity.

[0412] The human ALK5 precursor protein, isoform 1 sequence (NCBI Ref Seq NP_004603.1) is as follows:

| (SEQ ID NO: 30) | |
|---|---|
| 1 | MEAAVAAPRP RLLLLVLAAA AAAAAALLPG ATALQCFCHL CTKDNFTCVT |
| | DGLCFVSVTE |
| 61 | TTDKVIHNSM CIAEIDLIPR DRPFVCAPSS KTGSVTTTYC CNQDHCNKIE |
| | LPTTVKSSPG |
| 121 | LGPVELAAVI AGPVCFVCIS LMLMVYICHN RTVIHHRVPN EEDPSLDRPF |
| | ISEGTTLKDL |
| 181 | IYDMTTSGSG SGLPLLVQRT IARTIVLQES IGKGRFGEVW RGKWRGEEVA |
| | VKIFSSREER |
| 241 | SWFREAEIYQ TVMLRHENIL GFIAADNKDN GTWTQLWLVS DYHEHGSLFD |
| | YLNRYTVTVE |
| 301 | GMIKLALSTA SGLAHLHMEI VGTQGKPAIA HRDLKSKNIL VKKNGTCCIA |
| | DLGLAVRHDS |
| 361 | ATDTIDIAPN HRVGTKRYMA PEVLDDSINM KHFESFKRAD IYAMGLVFWE |
| | IARRCSIGGI |
| 421 | HEDYQLPYYD LVPSDPSVEE MRKVVCEQKL RPNIPNRWQS CEALRVMAKI |
| | MRECWYANGA |
| 481 | ARLTALRIKK TLSQLSQQEG IKM |

[0413] The signal peptide is indicated by a single underline and the extracellular domain is indicated in bold font.

[0414] A processed extracellular ALK5 polypeptide sequence is as follows:

(SEQ ID NO: 31)
AALLPGATALQCFCHLCTKDNFTCVTDGLCFVSVTETTDKVIHNSMCIAE
IDLIPRDRPFVCAPSSKTGSVTTTYCCNQDHCNKIELPTTVKSSPGLGPV
EL

[0415] A nucleic acid sequence encoding the ALK5 precursor protein is shown below (SEQ ID NO: 32), corresponding to nucleotides 77-1585 of Genbank Reference Sequence NM_004612.2. The signal sequence is underlined and the extracellular domain is indicated in bold font.

(SEQ ID NO: 32)
ATGGAGGCGGCGGTCGCTGCTCCGCGTCCCCGGCTGCTCCTCCTCGTGCT
GGCGGCGGCGGCGGCGGCGGCGGCGGCGCTGCTCCCGGGGGCGACGGCGT
TACAGTGTTTCTGCCACCTCTGTACAAAAGACAATTTTACTTGTGTGACA
GATGGGCTCTGCTTTGTCTCTGTCACAGAGACCACAGACAAAGTTATACA
CAACAGCATGTGTATAGCTGAAATTGACTTAATTCCTCGAGATAGGCCGT
TTGTATGTGCACCCTCTTCAAAAACTGGGTCTGTGACTACAACATATTGC
TGCAATCAGGACCATTGCAATAAAATAGAACTTCCAACTACTGTAAAGTC
ATCACCTGGCCTTGGTCCTGTGGAACTGGCAGCTGTCATTGCTGGACCAG
TGTGCTTCGTCTGCATCTCACTCATGTTGATGGTCTATATCTGCCACAAC
CGCACTGTCATTCACCATCGAGTGCCAAATGAAGAGGACCCTTCATTAGA
TCGCCCTTTTATTTCAGAGGGTACTACGTTGAAAGACTTAATTTATGATA
TGACAACGTCAGGTTCTGGCTCAGGTTTACCATTGCTTGTTCAGAGAACA
ATTGCGAGAACTATTGTGTTACAAGAAAGCATTGGCAAAGGTCGATTTGG
AGAAGTTTGGAGAGGAAAGTGGCGGGGAGAAGAAGTTGCTGTTAAGATAT
TCTCCTCTAGAGAAGAACGTTCGTGGTTCCGTGAGGCAGAGATTTATCAA
ACTGTAATGTTACGTCATGAAAACATCCTGGGATTTATAGCAGCAGACAA
TAAAGACAATGGTACTTGGACTCAGCTCTGGTTGGTGTCAGATTATCATG
AGCATGGATCCCTTTTTGATTACTTAAACAGATACACAGTTACTGTGGAA
GGAATGATAAAACTTGCTCTGTCCACGGCGAGCGGTCTTGCCCATCTTCA
CATGGAGATTGTTGGTACCCAAGGAAAGCCAGCCATTGCTCATAGAGATT
TGAAATCAAAGAATATCTTGGTAAAGAAGAATGGAACTTGCTGTATTGCA
GACTTAGGACTGGCAGTAAGACATGATTCAGCCACAGATACCATTGATAT
TGCTCCAAACCACAGAGTGGGAACAAAAAGGTACATGGCCCCTGAAGTTC
TCGATGATTCCATAAATATGAAACATTTTGAATCCTTCAAACGTGCTGAC
ATCTATGCAATGGGCTTAGTATTCTGGGAAATTGCTCGACGATGTTCCAT
TGGTGGAATTCATGAAGATTACCAACTGCCTTATTATGATCTTGTACCTT
CTGACCCATCAGTTGAAGAAATGAGAAAAGTTGTTTGTGAACAGAAGTTA
AGGCCAAATATCCCAAACAGATGGCAGAGCTGTGAAGCCTTGAGAGTAAT
GGCTAAAATTATGAGAGAATGTTGGTATGCCAATGGAGCAGCTAGGCTTA
CAGCATTGCGGATTAAGAAAACATTATCGCAACTCAGTCAACAGGAAGGC
ATCAAAATG

[0416] A nucleic acid sequence encoding an extracellular human ALK5 polypeptide is as follows:

(SEQ ID NO: 33)

GCGGCGCTGCTCCCGGGGGCGACGGCGTTACAGTGTTTCTGCCACCTCTG
TACAAAAGACAATTTTACTTGTGTGACAGATGGGCTCTGCTTTGTCTCTG
TCACAGAGACCACAGACAAAGTTATACACAACAGCATGTGTATAGCTGAA
ATTGACTTAATTCCTCGAGATAGGCCGTTTGTATGTGCACCCTCTTCAAA
AACTGGGTCTGTGACTACAACATATTGCTGCAATCAGGACCATTGCAATA
AAATAGAACTTCCAACTACTGTAAAGTCATCACCTGGCCTTGGTCCTGTG
GAACTG

[0417] An alternative isoform of the human ALK5 precursor protein sequence, isoform 2 (NCBI Ref Seq XP 005252207.1), is as follows:

| (SEQ ID NO: 87) | |
|---|---|
| 1 | MEAAVAAPRP RLLLLVLAAA AAAAAALLPG ATALQCFCHL CTKDNFTCVT |
| | DGLCFVSVTE |
| 61 | TTDKVIHNSM CIAEIDLIPR DRPFVCAPSS KTGSVTTTYC CNQDHCNKIE |
| | LPTTGPFSVK |
| 121 | SSPGLGPVEL AAVIAGPVCF VCISLMLMVY ICHNRTVIHH RVPNEEDPSL |
| | DRPFISEGTT |
| 181 | LKDLIYDMTT SGSGSGLPLL VQRTIARTIV LQESIGKGRF GEVWRGKWRG |
| | EEVAVKIFSS |
| 241 | REERSWFREA EIYQTVMLRH ENILGFIAAD NKDNGTWTQL WLVSDYHEHG |
| | SLFDYLNRYT |
| 301 | VTVEGMIKLA LSTASGLAHL HMEIVGTQGK PAIAHRDLKS KNILVKKNGT |
| | CCIADLGLAV |
| 361 | RHDSATDTID IAPNHRVGTK RYMAPEVLDD SINMKHFESF KRADIYAMGL |
| | VFWEIARRCS |
| 421 | IGGIHEDYQL PYYDLVPSDP SVEEMRKVVC EQKLRPNIPN RWQSCEALRV |
| | MAKIMRECWY |
| 481 | ANGAARLTAL RIKKTLSQLS QQEGIKM |

[0418] The signal peptide is indicated by a single underline and the extracellular domain is indicated in bold font.

[0419] A processed extracellular ALK5 polypeptide sequence (isoform 2) is as follows:

(SEQ ID NO: 88)

AALLPGATALQCFCHLCTKDNFTCVTDGLCFVSVTETTDKVIHNSMCIAE
IDLIPRDRPFVCAPSSKTGSVTTTYCCNQDHCNKIELPTTGPFSVKSSPG
LGPVEL

[0420] A nucleic acid sequence encoding human ALK5 precursor protein (isoform 2) is shown below (SEQ ID NO: 89), corresponding to nucleotides 77-1597 of Genbank Reference Sequence XM_005252150.1. The signal sequence is underlined and the extracellular domain is indicated in bold font.

(SEQ ID NO: 89)

ATGGAGGCGGCGGTCGCTGCTCCGCGTCCCCGGCTGCTCCTCCTCGTGCT
GGCGGCGGCGGCGGCGGCGGCGGCGGCGCTGCTCCCGGGGGCGACGGCGT
TACAGTGTTTCTGCCACCTCTGTACAAAAGACAATTTTACTTGTGTGACA
GATGGGCTCTGCTTTGTCTCTGTCACAGAGACCACAGACAAAGTTATACA
CAACAGCATGTGTATAGCTGAAATTGACTTAATTCCTCGAGATAGGCCGT
TTGTATGTGCACCCTCTTCAAAAACTGGGTCTGTGACTACAACATATTGC
TGCAATCAGGACCATTGCAATAAAATAGAACTTCCAACTACTGGCCCTTT
TTCAGTAAAGTCATCACCTGGCCTTGGTCCTGTGGAACTGGCAGCTGTCA
TTGCTGGACCAGTGTGCTTCGTCTGCATCTCACTCATGTTGATGGTCTAT
ATCTGCCACAACCGCACTGTCATTCACCATCGAGTGCCAAATGAAGAGGA
CCCTTCATTAGATCGCCCTTTTATTTCAGAGGGTACTACGTTGAAAGACT
TAATTTATGATATGACAACGTCAGGTTCTGGCTCAGGTTTACCATTGCTT
GTTCAGAGAACAATTGCGAGAACTATTGTGTTACAAGAAAGCATTGGCAA
AGGTCGATTTGGAGAAGTTTGGAGAGGAAAGTGGCGGGGAGAAGAAGTTG
CTGTTAAGATATTCTCCTCTAGAGAAGAACGTTCGTGGTTCCGTGAGGCA
GAGATTTATCAAACTGTAATGTTACGTCATGAAAACATCCTGGGATTTAT
AGCAGCAGACAATAAAGACAATGGTACTTGGACTCAGCTCTGGTTGGTGT
CAGATTATCATGAGCATGGATCCCTTTTTGATTACTTAAACAGATACACA
GTTACTGTGGAAGGAATGATAAAACTTGCTCTGTCCACGGCGAGCGGTCT
TGCCCATCTTCACATGGAGATTGTTGGTACCCAAGGAAAGCCAGCCATTG
CTCATAGAGATTTGAAATCAAAGAATATCTTGGTAAAGAAGAATGGAACT
TGCTGTATTGCAGACTTAGGACTGGCAGTAAGACATGATTCAGCCACAGA
TACCATTGATATTGCTCCAAACCACAGAGTGGGAACAAAAAGGTACATGG
CCCCTGAAGTTCTCGATGATTCCATAAATATGAAACATTTTGAATCCTTC
AAACGTGCTGACATCTATGCAATGGGCTTAGTATTCTGGGAAATTGCTCG
ACGATGTTCCATTGGTGGAATTCATGAAGATTACCAACTGCCTTATTATG
ATCTTGTACCTTCTGACCCATCAGTTGAAGAAATGAGAAAAGTTGTTTGT
GAACAGAAGTTAAGGCCAAATATCCCAAACAGATGGCAGAGCTGTGAAGC
CTTGAGAGTAATGGCTAAAATTATGAGAGAATGTTGGTATGCCAATGGAG
CAGCTAGGCTTACAGCATTGCGGATTAAGAAAACATTATCGCAACTCAGT
CAACAGGAAGGCATCAAAATG

[0421] A nucleic acid sequence encoding an processed extracellular ALK5 polypeptide is as follows:

(SEQ ID NO: 90)

GCGGCGCTGCTCCCGGGGGCGACGGCGTTACAGTGTTTCTGCCACCTCTG
TACAAAAGACAATTTTACTTGTGTGACAGATGGGCTCTGCTTTGTCTCTG
TCACAGAGACCACAGACAAAGTTATACACAACAGCATGTGTATAGCTGAA
ATTGACTTAATTCCTCGAGATAGGCCGTTTGTATGTGCACCCTCTTCAAA
AACTGGGTCTGTGACTACAACATATTGCTGCAATCAGGACCATTGCAATA
AAATAGAACTTCCAACTACTGGCCCTTTTTCAGTAAAGTCATCACCTGGC
CTTGGTCCTGTGGAACTG

[0422] In certain embodiments, the disclosure relates to heteromultimers that comprise at least one ALK5 polypeptide, which includes fragments, functional variants, and modified forms thereof. Preferably, ALK5 polypeptides for use in accordance with the disclosure (e.g., heteromultimers comprising an ALK5 polypeptide and uses thereof) are soluble (e.g., an extracellular domain of ALK5). In other preferred embodiments, ALK5 polypeptides for use in accordance with the disclosure bind to and/or inhibit (antagonize) activity (e.g., Smad signaling) of one or more TGF-beta superfamily ligands. In some embodiments, heteromultimers of the disclosure comprise at least one ALK5 polypeptide that is at least 70%, 75%, 80%, 85%, 90%, 91%, 92%, 93%, 94%, 95%, 96%, 97%, 98%, 99%, or 100% identical to the amino acid sequence of SEQ ID NOs: 30, 31, 87, or 88. In some embodiments, heteromultimers of the disclosure comprise at least one ALK5 polypeptide that is at least 70%, 75%, 80%, 85%, 90%, 91%, 92%, 93%, 94%, 95%, 96%, 97%, 98%, 99%, or 100% identical to a polypeptide that begins at any one of amino acids of 25-36 (e.g., amino acid residues 25, 26, 27, 28, 29, 30, 31, 32, 33, 34, 35, or 36) of SEQ ID NO: 30, and ends at any one of amino acids 101-126 (e.g., amino acid residues 101, 102, 103, 104, 105, 106, 107, 108, 109, 110, 111, 112, 113, 114, 115, 116, 117, 118, 119, 120, 121, 122, 123, 124, 125, or 126) of SEQ ID NO: 30. In some embodiments, heteromultimers of the disclosure comprise at least one ALK5 polypeptide that is at least 70%, 75%, 80%, 85%, 90%, 91%, 92%, 93%, 94%, 95%, 96%, 97%, 98%, 99%, or 100% identical to amino acids of 25-101 of SEQ ID NO: 30. In some embodiments, heteromultimers of the disclosure comprise at least one ALK5 polypeptide that is at least 70%, 75%, 80%, 85%, 90%, 91%, 92%, 93%, 94%, 95%, 96%, 97%, 98%, 99%, or 100% identical to amino acids of 25-126 of SEQ ID NO: 30. In some embodiments, heteromultimers of the disclosure comprise at least one ALK5 polypeptide that is at least 70%, 75%, 80%, 85%, 90%, 91%, 92%, 93%, 94%, 95%, 96%, 97%, 98%, 99%, or 100% identical to amino acids of 36-101 of SEQ ID NO: 30. In some embodiments, heteromultimers of the disclosure comprise at least one ALK5 polypeptide that is at least 70%, 75%, 80%, 85%, 90%, 91%, 92%, 93%, 94%, 95%, 96%, 97%, 98%, 99%, or 100% identical to amino acids of 36-126 of SEQ ID NO: 30. In some embodiments, heteromultimers of the disclosure comprise at least one ALK5 polypeptide that is at least 70%, 75%, 80%, 85%, 90%, 91%, 92%, 93%, 94%, 95%, 96%, 97%, 98%, 99%, or 100% identical to a polypeptide that begins at any one of amino acids of 25-36 (e.g., amino acid residues 25, 26, 27, 28, 29, 30, 31, 32, 33, 34, 35, or 36) of SEQ ID NO: 87, and ends at any one of amino acids 101-130 (e.g., amino acid residues 101, 102, 103, 104, 105, 106, 107, 108, 109, 110, 111, 112, 113, 114, 115, 116, 117, 118, 119, 120, 121, 122, 123, 124, 125, 126, 127, 128, 129 or 130) of SEQ ID NO: 87. In some embodiments, heteromultimers of the disclosure comprise at least one ALK5 polypeptide that is at least 70%, 75%, 80%, 85%, 90%, 91%, 92%, 93%, 94%, 95%, 96%, 97%, 98%, 99%, or 100% identical to amino acids of 25-101 of SEQ ID NO: 87. In some embodiments, heteromultimers of the disclosure comprise at least one ALK5 polypeptide that is at least 70%, 75%, 80%, 85%, 90%, 91%, 92%, 93%, 94%, 95%, 96%, 97%, 98%, 99%, or 100% identical to amino acids of 25-130 of SEQ ID NO: 87. In some embodiments, heteromultimers of the disclosure comprise at least one ALK5 polypeptide that is at least 70%, 75%, 80%, 85%, 90%, 91%, 92%, 93%, 94%, 95%, 96%, 97%, 98%, 99%, or 100% identical to amino acids of 36-101 of SEQ ID NO: 87. In some embodiments, heteromultimers of the disclosure comprise at least one ALK5 polypeptide that is at least 70%, 75%, 80%, 85%, 90%, 91%, 92%, 93%, 94%, 95%, 96%, 97%, 98%, 99%, or 100% identical to amino acids of 36-130 of SEQ ID NO: 87.

[0423] In certain aspects, the present disclosure relates to heteromultimers that comprise an ALK6 polypeptide. As used herein, the term “ALK6” refers to a family of activin receptor-like kinase-6 proteins from any species and variants derived from such ALK6 proteins by mutagenesis or other modification. Reference to ALK6 herein is understood to be a reference to any one of the currently identified forms. Members of the ALK6 family are generally transmembrane proteins, composed of a ligand-binding extracellular domain with a cysteine-rich region, a transmembrane domain, and a cytoplasmic domain with predicted serine/threonine kinase activity.

[0424] The term “ALK6 polypeptide” includes polypeptides comprising any naturally occurring polypeptide of an ALK6 family member as well as any variants thereof (including mutants, fragments, fusions, and peptidomimetic forms) that retain a useful activity.

[0425] The human ALK6 precursor protein, isoform 1 sequence (NCBI Ref Seq NP_001194.1) is as follows:

| (SEQ ID NO: 34) | |
|---|---|
| 1 | MLLRSAGKLN VGTKKEDGES TAPTPRPKVL RCKCHHHCPE DSVNNICSTD |
| | GYCFTMIEED |
| 61 | DSGLPVVTSG CLGLEGSDFQ CRDTPIPHQR RSIECCTERN ECNKDLHPTL |
| | PPLKNRDFVD |
| 121 | GPIHHRALLI SVTVCSLLLV LIILFCYFRY KRQETRPRYS IGLEQDETYI |
| | PPGESLRDLI |
| 181 | EQSQSSGSGS GLPLLVQRTI AKQIQMVKQI GKGRYGEVWM GKWRGEKVAV |
| | KVFFTTEEAS |
| 241 | WFRETEIYQT VLMRHENILG FIAADIKGTG SWTQLYLITD YHENGSLYDY |
| | LKSTTLDAKS |
| 301 | MLKLAYSSVS GLCHLHTEIF STQGKPAIAH RDLKSKNILV KKNGTCCIAD |
| | LGLAVKFISD |
| 361 | TNEVDIPPNT RVGTKRYMPP EVLDESLNRN HFQSYIMADM YSFGLILWEV |
| | ARRCVSGGIV |
| 421 | EEYQLPYHDL VPSDPSYEDM REIVCIKKLR PSFPNRWSSD ECLRQMGKLM |
| | TECWAHNPAS |
| 481 | RLTALRVKKT LAKMSESQDI KL |

[0426] The signal peptide is indicated by a single underline and the extracellular domain is indicated in bold font.

[0427] A processed extracellular ALK6 polypeptide sequence is as follows:

(SEQ ID NO: 35)

KKEDGESTAPTPRPKVLRCKCHHHCPEDSVNNICSTDGYCFTMIEEDDSG
LPVVTSGCLGLEGSDFQCRDTPIPHQRRSIECCTERNECNKDLHPTLPPL
KNRDFVDGPIHHR

[0428] A nucleic acid sequence encoding the ALK6 precursor protein is shown below (SEQ ID NO: 36), corresponding to nucleotides 275-1780 of Genbank Reference Sequence NM_001203.2. The signal sequence is underlined and the extracellular domain is indicated in bold font.

(SEQ ID NO: 36)

ATGCTTTTGCGAAGTGCAGGAAAATTAAATGTGGGCACCAAGAAAGAGGA
TGGTGAGAGTACAGCCCCCACCCCCCGTCCAAAGGTCTTGCGTTGTAAAT
GCCACCACCATTGTCCAGAAGACTCAGTCAACAATATTTGCAGCACAGAC
GGATATTGTTTCACGATGATAGAAGAGGATGACTCTGGGTTGCCTGTGGT
CACTTCTGGTTGCCTAGGACTAGAAGGCTCAGATTTTCAGTGTCGGGACA
CTCCCATTCCTCATCAAAGAAGATCAATTGAATGCTGCACAGAAAGGAAC
GAATGTAATAAAGACCTACACCCTACACTGCCTCCATTGAAAAACAGAGA
TTTTGTTGATGGACCTATACACCACAGGGCTTTACTTATATCTGTGACTG
TCTGTAGTTTGCTCTTGGTCCTTATCATATTATTTTGTTACTTCCGGTAT
AAAAGACAAGAAACCAGACCTCGATACAGCATTGGGTTAGAACAGGATGA
AACTTACATTCCTCCTGGAGAATCCCTGAGAGACTTAATTGAGCAGTCTC
AGAGCTCAGGAAGTGGATCAGGCCTCCCTCTGCTGGTCCAAAGGACTATA
GCTAAGCAGATTCAGATGGTGAAACAGATTGGAAAAGGTCGCTATGGGGA
AGTTTGGATGGGAAAGTGGCGTGGCGAAAAGGTAGCTGTGAAAGTGTTCT
TCACCACAGAGGAAGCCAGCTGGTTCAGAGAGACAGAAATATATCAGACA
GTGTTGATGAGGCATGAAAACATTTTGGGTTTCATTGCTGCAGATATCAA
AGGGACAGGGTCCTGGACCCAGTTGTACCTAATCACAGACTATCATGAAA
ATGGTTCCCTTTATGATTATCTGAAGTCCACCACCCTAGACGCTAAATCA
ATGCTGAAGTTAGCCTACTCTTCTGTCAGTGGCTTATGTCATTTACACAC
AGAAATCTTTAGTACTCAAGGCAAACCAGCAATTGCCCATCGAGATCTGA
AAAGTAAAAACATTCTGGTGAAGAAAAATGGAACTTGCTGTATTGCTGAC
CTGGGCCTGGCTGTTAAATTTATTAGTGATACAAATGAAGTTGACATACC
ACCTAACACTCGAGTTGGCACCAAACGCTATATGCCTCCAGAAGTGTTGG
ACGAGAGCTTGAACAGAAATCACTTCCAGTCTTACATCATGGCTGACATG
TATAGTTTTGGCCTCATCCTTTGGGAGGTTGCTAGGAGATGTGTATCAGG
AGGTATAGTGGAAGAATACCAGCTTCCTTATCATGACCTAGTGCCCAGTG
ACCCCTCTTATGAGGACATGAGGGAGATTGTGTGCATCAAGAAGTTACGC
CCCTCATTCCCAAACCGGTGGAGCAGTGATGAGTGTCTAAGGCAGATGGG
AAAACTCATGACAGAATGCTGGGCTCACAATCCTGCATCAAGGCTGACAG
CCCTGCGGGTTAAGAAAACACTTGCCAAAATGTCAGAGTCCCAGGACATT
AAACTC

[0429] A nucleic acid sequence encoding a processed extracellular ALK6 polypeptide is as follows:

(SEQ ID NO: 37)

AAGAAAGAGGATGGTGAGAGTACAGCCCCCACCCCCCGTCCAAAGGTCTT
GCGTTGTAAATGCCACCACCATTGTCCAGAAGACTCAGTCAACAATATTT
GCAGCACAGACGGATATTGTTTCACGATGATAGAAGAGGATGACTCTGGG
TTGCCTGTGGTCACTTCTGGTTGCCTAGGACTAGAAGGCTCAGATTTTCA
GTGTCGGGACACTCCCATTCCTCATCAAAGAAGATCAATTGAATGCTGCA
CAGAAAGGAACGAATGTAATAAAGACCTACACCCTACACTGCCTCCATTG
AAAAACAGAGATTTTGTTGATGGACCTATACACCACAGG

[0430] An alternative isoform of human ALK6 precursor protein sequence, isoform 2 (NCBI Ref Seq NP_001243722.1) is as follows:

| (SEQ ID NO: 91) | |
|---|---|
| 1 | MGWLEELNWQ LHIFLLILLS MHTRANFLDN MLLRSAGKLN VGTKKEDGES |
| | TAPTPRPKVL |
| 61 | RCKCHHHCPE DSVNNICSTD GYCFTMIEED DSGLPVVTSG CLGLEGSDFQ |
| | CRDTPIPHQR |
| 121 | RSIECCTERN ECNKDLHPTL PPLKNRDFVD GPIHHRALLI SVTVCSLLLV |
| | LIILFCYFRY |
| 181 | KRQETRPRYS IGLEQDETYI PPGESLRDLI EQSQSSGSGS GLPLLVQRTI |
| | AKQIQMVKQI |
| 241 | GKGRYGEVWM GKWRGEKVAV KVFFTTEEAS WFRETEIYQT VLMRHENILG |
| | FIAADIKGTG |
| 301 | SWTQLYLITD YHENGSLYDY LKSTTLDAKS MLKLAYSSVS GLCHLHTEIF |
| | STQGKPAIAH |
| 361 | RDLKSKNILV KKNGTCCIAD LGLAVKFISD TNEVDIPPNT RVGTKRYMPP |
| | EVLDESLNRN |
| 421 | HFQSYIMADM YSFGLILWEV ARRCVSGGIV EEYQLPYHDL VPSDPSYEDM |
| | REIVCIKKLR |
| 481 | PSFPNRWSSD ECLRQMGKLM TECWAHNPAS RLTALRVKKT LAKMSESQDI KL |

[0431] The signal peptide is indicated by a single underline and the extracellular domain is indicated in bold font.

[0432] A processed extracellular ALK6 polypeptide sequence (isoform 2) is as follows:

(SEQ ID NO: 92)

NFLDNMLLRSAGKLNVGTKKEDGESTAPTPRPKVLRCKCHHHCPEDSVNN
ICSTDGYCFTMIEEDDSGLPVVTSGCLGLEGSDFQCRDTPIPHQRRSIEC
CTERNECNKDLHPTLPPLKNRDFVDGPIHHR

[0433] A nucleic acid sequence encoding human ALK6 precursor protein (isoform 2) is shown below, corresponding to nucleotides 22-1617 of Genbank Reference Sequence NM_001256793.1. The signal sequence is underlined and the extracellular domain is indicated in bold font.

(SEQ ID NO: 93)

ATGGGTTGGCTGGAAGAACTAAACTGGCAGCTTCACATTTTCTTGCTCAT
TCTTCTCTCTATGCACACAAGGGCAAACTTCCTTGATAACATGCTTTTGC
GAAGTGCAGGAAAATTAAATGTGGGCACCAAGAAAGAGGATGGTGAGAGT
ACAGCCCCCACCCCCCGTCCAAAGGTCTTGCGTTGTAAATGCCACCACCA
TTGTCCAGAAGACTCAGTCAACAATATTTGCAGCACAGACGGATATTGTT
TCACGATGATAGAAGAGGATGACTCTGGGTTGCCTGTGGTCACTTCTGGT
TGCCTAGGACTAGAAGGCTCAGATTTTCAGTGTCGGGACACTCCCATTCC
TCATCAAAGAAGATCAATTGAATGCTGCACAGAAAGGAACGAATGTAATA
AAGACCTACACCCTACACTGCCTCCATTGAAAAACAGAGATTTTGTTGAT
GGACCTATACACCACAGGGCTTTACTTATATCTGTGACTGTCTGTAGTTT
GCTCTTGGTCCTTATCATATTATTTTGTTACTTCCGGTATAAAAGACAAG
AAACCAGACCTCGATACAGCATTGGGTTAGAACAGGATGAAACTTACATT
CCTCCTGGAGAATCCCTGAGAGACTTAATTGAGCAGTCTCAGAGCTCAGG
AAGTGGATCAGGCCTCCCTCTGCTGGTCCAAAGGACTATAGCTAAGCAGA
TTCAGATGGTGAAACAGATTGGAAAAGGTCGCTATGGGGAAGTTTGGATG
GGAAAGTGGCGTGGCGAAAAGGTAGCTGTGAAAGTGTTCTTCACCACAGA
GGAAGCCAGCTGGTTCAGAGAGACAGAAATATATCAGACAGTGTTGATGA
GGCATGAAAACATTTTGGGTTTCATTGCTGCAGATATCAAAGGGACAGGG
TCCTGGACCCAGTTGTACCTAATCACAGACTATCATGAAAATGGTTCCCT
TTATGATTATCTGAAGTCCACCACCCTAGACGCTAAATCAATGCTGAAGT
TAGCCTACTCTTCTGTCAGTGGCTTATGTCATTTACACACAGAAATCTTT
AGTACTCAAGGCAAACCAGCAATTGCCCATCGAGATCTGAAAAGTAAAAA
CATTCTGGTGAAGAAAAATGGAACTTGCTGTATTGCTGACCTGGGCCTGG
CTGTTAAATTTATTAGTGATACAAATGAAGTTGACATACCACCTAACACT
CGAGTTGGCACCAAACGCTATATGCCTCCAGAAGTGTTGGACGAGAGCTT
GAACAGAAATCACTTCCAGTCTTACATCATGGCTGACATGTATAGTTTTG
GCCTCATCCTTTGGGAGGTTGCTAGGAGATGTGTATCAGGAGGTATAGTG
GAAGAATACCAGCTTCCTTATCATGACCTAGTGCCCAGTGACCCCTCTTA
TGAGGACATGAGGGAGATTGTGTGCATCAAGAAGTTACGCCCCTCATTCC
CAAACCGGTGGAGCAGTGATGAGTGTCTAAGGCAGATGGGAAAACTCATG
ACAGAATGCTGGGCTCACAATCCTGCATCAAGGCTGACAGCCCTGCGGGT
TAAGAAAACACTTGCCAAAATGTCAGAGTCCCAGGACATTAAACTC

[0434] A nucleic acid sequence encoding a processed extracellular ALK6 polypeptide is as follows:

(SEQ ID NO: 94)

AACTTCCTTGATAACATGCTTTTGCGAAGTGCAGGAAAATTAAATGTGGG
CACCAAGAAAGAGGATGGTGAGAGTACAGCCCCCACCCCCCGTCCAAAGG
TCTTGCGTTGTAAATGCCACCACCATTGTCCAGAAGACTCAGTCAACAAT
ATTTGCAGCACAGACGGATATTGTTTCACGATGATAGAAGAGGATGACTC
TGGGTTGCCTGTGGTCACTTCTGGTTGCCTAGGACTAGAAGGCTCAGATT
TTCAGTGTCGGGACACTCCCATTCCTCATCAAAGAAGATCAATTGAATGC
TGCACAGAAAGGAACGAATGTAATAAAGACCTACACCCTACACTGCCTCC
ATTGAAAAACAGAGATTTTGTTGATGGACCTATACACCACAGG

[0435] In certain embodiments, the disclosure relates to heteromultimers that comprise at least one ALK6 polypeptide, which includes fragments, functional variants, and modified forms thereof. Preferably, ALK6 polypeptides for use in accordance with the disclosure (e.g., heteromultimers comprising an ALK6 polypeptide and uses thereof) are soluble (e.g., an extracellular domain of ALK6). In other preferred embodiments, ALK6 polypeptides for use in accordance with the disclosure bind to and/or inhibit (antagonize) activity (e.g., Smad signaling) of one or more TGF-beta superfamily ligands. In some embodiments, heteromultimers of the disclosure comprise at least one ALK6 polypeptide that is at least 70%, 75%, 80%, 85%, 90%, 91%, 92%, 93%, 94%, 95%, 96%, 97%, 98%, 99%, or 100% identical to the amino acid sequence of SEQ ID NO: 34, 35, 91, or 92. In some embodiments, heteromultimer complexes of the disclosure consist or consist essentially of at least one ALK6 polypeptide that is at least 70%, 75%, 80%, 85%, 90%, 91%, 92%, 93%, 94%, 95%, 96%, 97%, 98%, 99%, or 100% identical to the amino acid sequence of SEQ ID NOs: 34, 35, 91, or 92. In some embodiments, heteromultimers of the disclosure comprise at least one ALK6 polypeptide that is at least 70%, 75%, 80%, 85%, 90%, 91%, 92%, 93%, 94%, 95%, 96%, 97%, 98%, 99%, or 100% identical to a polypeptide that begins at any one of amino acids of 14-32 (e.g., amino acid residues 14, 15, 16, 17, 18, 19, 20, 21, 22, 23, 24, 25, 26, 27, 28, 29, 30, 31, or 32) of SEQ ID NO: 34, and ends at any one of amino acids 102-126 (e.g., amino acid residues 102, 103, 104, 105, 106, 107, 108, 109, 110, 111, 112, 113, 114, 115, 116, 117, 118, 119, 120, 121, 122, 123, 124, 125, or 126) of SEQ ID NO: 34. In some embodiments, heteromultimers of the disclosure comprise at least one ALK6 polypeptide that is at least 70%, 75%, 80%, 85%, 90%, 91%, 92%, 93%, 94%, 95%, 96%, 97%, 98%, 99%, or 100% identical to amino acids of 14-102 of SEQ ID NO: 34. In some embodiments, heteromultimers of the disclosure comprise at least one ALK6 polypeptide that is at least 70%, 75%, 80%, 85%, 90%, 91%, 92%, 93%, 94%, 95%, 96%, 97%, 98%, 99%, or 100% identical to amino acids of 14-126 of SEQ ID NO: 34. In some embodiments, heteromultimers of the disclosure comprise at least one ALK6 polypeptide that is at least 70%, 75%, 80%, 85%, 90%, 91%, 92%, 93%, 94%, 95%, 96%, 97%, 98%, 99%, or 100% identical to amino acids of 32-102 of SEQ ID NO: 34. In some embodiments, heteromultimers of the disclosure comprise at least one ALK6 polypeptide that is at least 70%, 75%, 80%, 85%, 90%, 91%, 92%, 93%, 94%, 95%, 96%, 97%, 98%, 99%, or 100% identical to amino acids of 32-126 of SEQ ID NO: 34. In some embodiments, heteromultimers of the disclosure comprise at least one ALK6 polypeptide that is at least 70%, 75%, 80%, 85%, 90%, 91%, 92%, 93%, 94%, 95%, 96%, 97%, 98%, 99%, or 100% identical to a polypeptide that begins at any one of amino acids of 26-62 (e.g., amino acid residues 26, 27, 28, 29, 30, 31, 32, 33, 34, 35, 36, 37, 38, 39, 40, 41, 42, 43, 44, 45, 46, 47, 48, 49, 50, 51, 52, 53, 54, 55, 56, 57, 58, 59, 60, 61, or 62) of SEQ ID NO: 91, and ends at any one of amino acids 132-156 (e.g., amino acid residues 132, 133, 134, 135, 136, 137, 138, 139, 140, 141, 142, 143, 144, 145, 146, 147, 148, 149, 150, 151, 152, 153, 154, 155, or 156) of SEQ ID NO: 91. In some embodiments, heteromultimers of the disclosure comprise at least one ALK6 polypeptide that is at least 70%, 75%, 80%, 85%, 90%, 91%, 92%, 93%, 94%, 95%, 96%, 97%, 98%, 99%, or 100% identical to amino acids of 26-132 of SEQ ID NO: 91. In some embodiments, heteromultimers of the disclosure comprise at least one ALK6 polypeptide that is at least 70%, 75%, 80%, 85%, 90%, 91%, 92%, 93%, 94%, 95%, 96%, 97%, 98%, 99%, or 100% identical to amino acids of 26-156 of SEQ ID NO: 91. In some embodiments, heteromultimers of the disclosure comprise at least one ALK6 polypeptide that is at least 70%, 75%, 80%, 85%, 90%, 91%, 92%, 93%, 94%, 95%, 96%, 97%, 98%, 99%, or 100% identical to amino acids of 62-132 of SEQ ID NO: 91. In some embodiments, heteromultimers of the disclosure comprise at least one ALK6 polypeptide that is at least 70%, 75%, 80%, 85%, 90%, 91%, 92%, 93%, 94%, 95%, 96%, 97%, 98%, 99%, or 100% identical to amino acids of 62-156 of SEQ ID NO: 91.

[0436] In certain aspects, the present disclosure relates to heteromultimers that comprise an ALK7 polypeptide. As used herein, the term “ALK7” refers to a family of activin receptor-like kinase-7 proteins from any species and variants derived from such ALK7 proteins by mutagenesis or other modification. Reference to ALK7 herein is understood to be a reference to any one of the currently identified forms. Members of the ALK7 family are generally transmembrane proteins, composed of a ligand-binding extracellular domain with a cysteine-rich region, a transmembrane domain, and a cytoplasmic domain with predicted serine/threonine kinase activity.

[0437] The term “ALK7 polypeptide” includes polypeptides comprising any naturally occurring polypeptide of an ALK7 family member as well as any variants thereof (including mutants, fragments, fusions, and peptidomimetic forms) that retain a useful activity.

[0438] Four naturally occurring isoforms of human ALK7 have been described. The sequence of human ALK7 isoform 1 precursor protein (NCBI Ref Seq NP_660302.2) is as follows:

| (SEQ ID NO: 38) | |
|---|---|
| 1 | MTRALCSALR QALLLLAAAA ELSPGLKCVC LLCDSSNFTC QTEGACWASV |
| | MLTNGKEQVI |
| 61 | KSCVSLPELN AQVFCHSSNN VTKTECCFTD FCNNITLHLP TASPNAPKLG |
| | PMELAIIITV |
| 121 | PVCLLSIAAM LTVWACQGRQ CSYRKKKRPN VEEPLSECNL VNAGKTLKDL |
| | IYDVTASGSG |
| 181 | SGLPLLVQRT IARTIVLQEI VGKGRFGEVW HGRWCGEDVA VKIFSSRDER |
| | SWFREAEIYQ |
| 241 | TVMLRHENIL GFIAADNKDN GTWTQLWLVS EYHEQGSLYD YLNRNIVTVA |
| | GMIKLALSIA |
| 301 | SGLAHLHMEI VGTQGKPAIA HRDIKSKNIL VKKCETCAIA DLGLAVKHDS |
| | ILNTIDIPQN |
| 361 | PKVGTKRYMA PEMLDDTMNV NIFESFKRAD IYSVGLVYWE IARRCSVGGI |
| | VEEYQLPYYD |
| 421 | MVPSDPSIEE MRKVVCDQKF RPSIPNQWQS CEALRVMGRI MRECWYANGA |
| | ARLTALRIKK |
| 481 | TISQLCVKED CKA |

[0439] The signal peptide is indicated by a single underline and the extracellular domain is indicated in bold font.

[0440] A processed extracellular ALK7 isoform 1 polypeptide sequence is as follows:

(SEQ ID NO: 39)

ELSPGLKCVCLLCDSSNFTCQTEGACWASVMLTNGKEQVIKSCVSLPELN
AQVFCHSSNNVTKTECCFTDFCNNITLHLPTASPNAPKLGPME

[0441] A nucleic acid sequence encoding human ALK7 isoform 1 precursor protein is shown below (SEQ ID NO: 40), corresponding to nucleotides 244-1722 of Genbank Reference Sequence NM_145259.2. The signal sequence is underlined and the extracellular domain is indicated in bold font.

(SEQ ID NO: 40)

ATGACCCGGGCGCTCTGCTCAGCGCTCCGCCAGGCTCTCCTGCTGCTCGC
AGCGGCCGCCGAGCTCTCGCCAGGACTGAAGTGTGTATGTCTTTTGTGTG
ATTCTTCAAACTTTACCTGCCAAACAGAAGGAGCATGTTGGGCATCAGTC
ATGCTAACCAATGGAAAAGAGCAGGTGATCAAATCCTGTGTCTCCCTTCC
AGAACTGAATGCTCAAGTCTTCTGTCATAGTTCCAACAATGTTACCAAAA
CCGAATGCTGCTTCACAGATTTTTGCAACAACATAACACTGCACCTTCCA
ACAGCATCACCAAATGCCCCAAAACTTGGACCCATGGAGCTGGCCATCAT
TATTACTGTGCCTGTTTGCCTCCTGTCCATAGCTGCGATGCTGACAGTAT
GGGCATGCCAGGGTCGACAGTGCTCCTACAGGAAGAAAAAGAGACCAAAT
GTGGAGGAACCACTCTCTGAGTGCAATCTGGTAAATGCTGGAAAAACTCT
GAAAGATCTGATTTATGATGTGACCGCCTCTGGATCTGGCTCTGGTCTAC
CTCTGTTGGTTCAAAGGACAATTGCAAGGACGATTGTGCTTCAGGAAATA
GTAGGAAAAGGTAGATTTGGTGAGGTGTGGCATGGAAGATGGTGTGGGGA
AGATGTGGCTGTGAAAATATTCTCCTCCAGAGATGAAAGATCTTGGTTTC
GTGAGGCAGAAATTTACCAGACGGTCATGCTGCGACATGAAAACATCCTT
GGTTTCATTGCTGCTGACAACAAAGATAATGGAACTTGGACTCAACTTTG
GCTGGTATCTGAATATCATGAACAGGGCTCCTTATATGACTATTTGAATA
GAAATATAGTGACCGTGGCTGGAATGATCAAGCTGGCGCTCTCAATTGCT
AGTGGTCTGGCACACCTTCATATGGAGATTGTTGGTACACAAGGTAAACC
TGCTATTGCTCATCGAGACATAAAATCAAAGAATATCTTAGTGAAAAAGT
GTGAAACTTGTGCCATAGCGGACTTAGGGTTGGCTGTGAAGCATGATTCA
ATACTGAACACTATCGACATACCTCAGAATCCTAAAGTGGGAACCAAGAG
GTATATGGCTCCTGAAATGCTTGATGATACAATGAATGTGAATATCTTTG
AGTCCTTCAAACGAGCTGACATCTATTCTGTTGGTCTGGTTTACTGGGAA
ATAGCCCGGAGGTGTTCAGTCGGAGGAATTGTTGAGGAGTACCAATTGCC
TTATTATGACATGGTGCCTTCAGATCCCTCGATAGAGGAAATGAGAAAGG
TTGTTTGTGACCAGAAGTTTCGACCAAGTATCCCAAACCAGTGGCAAAGT
TGTGAAGCACTCCGAGTCATGGGGAGAATAATGCGTGAGTGTTGGTATGC
CAACGGAGCGGCCCGCCTAACTGCTCTTCGTATTAAGAAGACTATATCTC
AACTTTGTGTCAAAGAAGACTGCAAAGCC

[0442] A nucleic acid sequence encoding a processed extracellular ALK7 polypeptide (isoform 1) is as follows:

(SEQ ID NO: 41)

GAGCTCTCGCCAGGACTGAAGTGTGTATGTCTTTTGTGTGATTCTTCAAA
CTTTACCTGCCAAACAGAAGGAGCATGTTGGGCATCAGTCATGCTAACCA
ATGGAAAAGAGCAGGTGATCAAATCCTGTGTCTCCCTTCCAGAACTGAAT
GCTCAAGTCTTCTGTCATAGTTCCAACAATGTTACCAAAACCGAATGCTG
CTTCACAGATTTTTGCAACAACATAACACTGCACCTTCCAACAGCATCAC
CAAATGCCCCAAAACTTGGACCCATGGAG

[0443] The amino acid sequence of an alternative isoform of human ALK7, isoform 2 (NCBI Ref Seq NP_001104501.1), is shown in its processed form as follows (SEQ ID NO: 301), where the extracellular domain is indicated in bold font.

| (SEQ ID NO: 301) | |
|---|---|
| 1 | MLTNGKEQVI KSCVSLPELN AQVFCHSSNN VTKTECCFTD FCNNITLHLP |
| | TASPNAPKLG |
| 61 | PMELAIIITV PVCLLSIAAM LTVWACQGRQ CSYRKKKRPN VEEPLSECNL |
| | VNAGKTLKDL |
| 121 | IYDVTASGSG SGLPLLVQRT IARTIVLQEI VGKGRFGEVW HGRWCGEDVA |
| | VKIFSSRDER |
| 181 | SWFREAEIYQ TVMLRHENIL GFIAADNKDN GTWTQLWLVS EYHEQGSLYD |
| | YLNRNIVTVA |
| 241 | GMIKLALSIA SGLAHLHMEI VGTQGKPAIA HRDIKSKNIL VKKCETCAIA |
| | DLGLAVKHDS |
| 301 | ILNTIDIPQN PKVGTKRYMA PEMLDDTMNV NIFESFKRAD IYSVGLVYWE |
| | IARRCSVGGI |
| 361 | VEEYQLPYYD MVPSDPSIEE MRKVVCDQKF RPSIPNQWQS CEALRVMGRI |
| | MRECWYANGA |
| 421 | ARLTALRIKK TISQLCVKED CKA |

[0444] An amino acid sequence of an extracellular ALK7 polypeptide (isoform 2) is as follows:

(SEQ ID NO: 302)

MLTNGKEQVIKSCVSLPELNAQVFCHSSNNVTKTECCFTDFCNNITLHLP
TASPNAPKLGPME.

[0445] A nucleic acid sequence encoding the processed ALK7 polypeptide (isoform 2) is shown below (SEQ ID NO: 303), corresponding to nucleotides 279-1607 of NCBI Reference Sequence NM_001111031.1. The extracellular domain is indicated in bold font.

(SEQ ID NO: 303)

ATGCTAACCAATGGAAAAGAGCAGGTGATCAAATCCTGTGTCTCCCTTCC
AGAACTGAATGCTCAAGTCTTCTGTCATAGTTCCAACAATGTTACCAAAA
CCGAATGCTGCTTCACAGATTTTTGCAACAACATAACACTGCACCTTCCA
ACAGCATCACCAAATGCCCCAAAACTTGGACCCATGGAGCTGGCCATCAT
TATTACTGTGCCTGTTTGCCTCCTGTCCATAGCTGCGATGCTGACAGTAT
GGGCATGCCAGGGTCGACAGTGCTCCTACAGGAAGAAAAAGAGACCAAAT
GTGGAGGAACCACTCTCTGAGTGCAATCTGGTAAATGCTGGAAAAACTCT
GAAAGATCTGATTTATGATGTGACCGCCTCTGGATCTGGCTCTGGTCTAC
CTCTGTTGGTTCAAAGGACAATTGCAAGGACGATTGTGCTTCAGGAAATA
GTAGGAAAAGGTAGATTTGGTGAGGTGTGGCATGGAAGATGGTGTGGGGA
AGATGTGGCTGTGAAAATATTCTCCTCCAGAGATGAAAGATCTTGGTTTC
GTGAGGCAGAAATTTACCAGACGGTCATGCTGCGACATGAAAACATCCTT
GGTTTCATTGCTGCTGACAACAAAGATAATGGAACTTGGACTCAACTTTG
GCTGGTATCTGAATATCATGAACAGGGCTCCTTATATGACTATTTGAATA
GAAATATAGTGACCGTGGCTGGAATGATCAAGCTGGCGCTCTCAATTGCT
AGTGGTCTGGCACACCTTCATATGGAGATTGTTGGTACACAAGGTAAACC
TGCTATTGCTCATCGAGACATAAAATCAAAGAATATCTTAGTGAAAAAGT
GTGAAACTTGTGCCATAGCGGACTTAGGGTTGGCTGTGAAGCATGATTCA
ATACTGAACACTATCGACATACCTCAGAATCCTAAAGTGGGAACCAAGAG
GTATATGGCTCCTGAAATGCTTGATGATACAATGAATGTGAATATCTTTG
AGTCCTTCAAACGAGCTGACATCTATTCTGTTGGTCTGGTTTACTGGGAA
ATAGCCCGGAGGTGTTCAGTCGGAGGAATTGTTGAGGAGTACCAATTGCC
TTATTATGACATGGTGCCTTCAGATCCCTCGATAGAGGAAATGAGAAAGG
TTGTTTGTGACCAGAAGTTTCGACCAAGTATCCCAAACCAGTGGCAAAGT
TGTGAAGCACTCCGAGTCATGGGGAGAATAATGCGTGAGTGTTGGTATGC
CAACGGAGCGGCCCGCCTAACTGCTCTTCGTATTAAGAAGACTATATCTC
AACTTTGTGTCAAAGAAGACTGCAAAGCC

[0446] A nucleic acid sequence encoding an extracellular ALK7 polypeptide (isoform 2) is as follows (SEQ ID NO: 304):

(SEQ ID NO: 304)

ATGCTAACCAATGGAAAAGAGCAGGTGATCAAATCCTGTGTCTCCCTTCC
AGAACTGAATGCTCAAGTCTTCTGTCATAGTTCCAACAATGTTACCAAAA
CCGAATGCTGCTTCACAGATTTTTGCAACAACATAACACTGCACCTTCCA
ACAGCATCACCAAATGCCCCAAAACTTGGACCCATGGAG

[0447] An amino acid sequence of an alternative human ALK7 precursor protein, isoform 3 (NCBI Ref Seq NP_001104502.1), is shown as follows (SEQ ID NO: 305), where the signal peptide is indicated by a single underline.

| (SEQ ID NO: 305) | |
|---|---|
| 1 | MTRALCSALR QALLLLAAAA ELSPGLKCVC LLCDSSNFTC QTEGACWASV |
| | MLTNGKEQVI |
| 61 | KSCVSLPELN AQVFCHSSNN VTKTECCFTD FCNNITLHLP TGLPLLVQRT |
| | IARTIVLQEI |
| 121 | VGKGRFGEVW HGRWCGEDVA VKIFSSRDER SWFREAEIYQ TVMLRHENIL |
| | GFIAADNKDN |
| 181 | GTWTQLWLVS EYHEQGSLYD YLNRNIVTVA GMIKLALSIA SGLAHLHMEI |
| | VGTQGKPAIA |
| 241 | HRDIKSKNIL VKKCETCAIA DLGLAVKHDS ILNTIDIPQN PKVGTKRYMA |
| | PEMLDDTMNV |
| 301 | NIFESFKRAD IYSVGLVYWE IARRCSVGGI VEEYQLPYYD MVPSDPSIEE |
| | MRKVVCDQKF |
| 361 | RPSIPNQWQS CEALRVMGRI MRECWYANGA ARLTALRIKK TISQLCVKED CKA |

[0448] An amino acid sequence of an processed ALK7 polypeptide (isoform 3) is as follows (SEQ ID NO: 306). This isoform lacks a transmembrane domain and is therefore proposed to be soluble in its entirety (Roberts et al., 2003, Biol Reprod 68:1719-1726). N-terminal variants of SEQ ID NO: 306 are predicted as described below.

| (SEQ ID NO: 306) | |
|---|---|
| 1 | ELSPGLKCVC LLCDSSNFTC QTEGACWASV MLTNGKEQVI KSCVSLPELN |
| | AQVFCHSSNN |
| 61 | VTKTECCFTD FCNNITLHLP TGLPLLVQRT IARTIVLQEI VGKGRFGEVW |
| | HGRWCGEDVA |
| 121 | VKIFSSRDER SWFREAEIYQ TVMLRHENIL GFIAADNKDN GTWTQLWLVS |
| | EYHEQGSLYD |
| 181 | YLNRNIVTVA GMIKLALSIA SGLAHLHMEI VGTQGKPAIA HRDIKSKNIL |
| | VKKCETCAIA |
| 241 | DLGLAVKHDS ILNTIDIPQN PKVGTKRYMA PEMLDDTMNV NIFESFKRAD |
| | IYSVGLVYWE |
| 301 | IARRCSVGGI VEEYQLPYYD MVPSDPSIEE MRKVVCDQKF RPSIPNQWQS |
| | CEALRVMGRI |
| 361 | MRECWYANGA ARLTALRIKK TISQLCVKED CKA |

[0449] A nucleic acid sequence encoding the unprocessed ALK7 polypeptide precursor protein (isoform 3) is shown below (SEQ ID NO: 307), corresponding to nucleotides 244-1482 of NCBI Reference Sequence NM_001111032.1. The signal sequence is indicated by solid underline.

(SEQ ID NO: 307)

ATGACCCGGGCGCTCTGCTCAGCGCTCCGCCAGGCTCTCCTGCTGCTCGC
AGCGGCCGCCGAGCTCTCGCCAGGACTGAAGTGTGTATGTCTTTTGTGTG
ATTCTTCAAACTTTACCTGCCAAACAGAAGGAGCATGTTGGGCATCAGTC
ATGCTAACCAATGGAAAAGAGCAGGTGATCAAATCCTGTGTCTCCCTTCC
AGAACTGAATGCTCAAGTCTTCTGTCATAGTTCCAACAATGTTACCAAAA
CCGAATGCTGCTTCACAGATTTTTGCAACAACATAACACTGCACCTTCCA
ACAGGTCTACCTCTGTTGGTTCAAAGGACAATTGCAAGGACGATTGTGCT
TCAGGAAATAGTAGGAAAAGGTAGATTTGGTGAGGTGTGGCATGGAAGAT
GGTGTGGGGAAGATGTGGCTGTGAAAATATTCTCCTCCAGAGATGAAAGA
TCTTGGTTTCGTGAGGCAGAAATTTACCAGACGGTCATGCTGCGACATGA
AAACATCCTTGGTTTCATTGCTGCTGACAACAAAGATAATGGAACTTGGA
CTCAACTTTGGCTGGTATCTGAATATCATGAACAGGGCTCCTTATATGAC
TATTTGAATAGAAATATAGTGACCGTGGCTGGAATGATCAAGCTGGCGCT
CTCAATTGCTAGTGGTCTGGCACACCTTCATATGGAGATTGTTGGTACAC
AAGGTAAACCTGCTATTGCTCATCGAGACATAAAATCAAAGAATATCTTA
GTGAAAAAGTGTGAAACTTGTGCCATAGCGGACTTAGGGTTGGCTGTGAA
GCATGATTCAATACTGAACACTATCGACATACCTCAGAATCCTAAAGTGG
GAACCAAGAGGTATATGGCTCCTGAAATGCTTGATGATACAATGAATGTG
AATATCTTTGAGTCCTTCAAACGAGCTGACATCTATTCTGTTGGTCTGGT
TTACTGGGAAATAGCCCGGAGGTGTTCAGTCGGAGGAATTGTTGAGGAGT
ACCAATTGCCTTATTATGACATGGTGCCTTCAGATCCCTCGATAGAGGAA
ATGAGAAAGGTTGTTTGTGACCAGAAGTTTCGACCAAGTATCCCAAACCA
GTGGCAAAGTTGTGAAGCACTCCGAGTCATGGGGAGAATAATGCGTGAGT
GTTGGTATGCCAACGGAGCGGCCCGCCTAACTGCTCTTCGTATTAAGAAG
ACTATATCTCAACTTTGTGTCAAAGAAGACTGCAAAGCC

[0450] A nucleic acid sequence encoding a processed ALK7 polypeptide (isoform 3) is as follows (SEQ ID NO: 308):

(SEQ ID NO: 308)

GAGCTCTCGCCAGGACTGAAGTGTGTATGTCTTTTGTGTGATTCTTCAAA
CTTTACCTGCCAAACAGAAGGAGCATGTTGGGCATCAGTCATGCTAACCA
ATGGAAAAGAGCAGGTGATCAAATCCTGTGTCTCCCTTCCAGAACTGAAT
GCTCAAGTCTTCTGTCATAGTTCCAACAATGTTACCAAAACCGAATGCTG
CTTCACAGATTTTTGCAACAACATAACACTGCACCTTCCAACAGGTCTAC
CTCTGTTGGTTCAAAGGACAATTGCAAGGACGATTGTGCTTCAGGAAATA
GTAGGAAAAGGTAGATTTGGTGAGGTGTGGCATGGAAGATGGTGTGGGGA
AGATGTGGCTGTGAAAATATTCTCCTCCAGAGATGAAAGATCTTGGTTTC
GTGAGGCAGAAATTTACCAGACGGTCATGCTGCGACATGAAAACATCCTT
GGTTTCATTGCTGCTGACAACAAAGATAATGGAACTTGGACTCAACTTTG
GCTGGTATCTGAATATCATGAACAGGGCTCCTTATATGACTATTTGAATA
GAAATATAGTGACCGTGGCTGGAATGATCAAGCTGGCGCTCTCAATTGCT
AGTGGTCTGGCACACCTTCATATGGAGATTGTTGGTACACAAGGTAAACC
TGCTATTGCTCATCGAGACATAAAATCAAAGAATATCTTAGTGAAAAAGT
GTGAAACTTGTGCCATAGCGGACTTAGGGTTGGCTGTGAAGCATGATTCA
ATACTGAACACTATCGACATACCTCAGAATCCTAAAGTGGGAACCAAGAG
GTATATGGCTCCTGAAATGCTTGATGATACAATGAATGTGAATATCTTTG
AGTCCTTCAAACGAGCTGACATCTATTCTGTTGGTCTGGTTTACTGGGAA
ATAGCCCGGAGGTGTTCAGTCGGAGGAATTGTTGAGGAGTACCAATTGCC
TTATTATGACATGGTGCCTTCAGATCCCTCGATAGAGGAAATGAGAAAGG
TTGTTTGTGACCAGAAGTTTCGACCAAGTATCCCAAACCAGTGGCAAAGT
TGTGAAGCACTCCGAGTCATGGGGAGAATAATGCGTGAGTGTTGGTATGC
CAACGGAGCGGCCCGCCTAACTGCTCTTCGTATTAAGAAGACTATATCTC
AACTTTGTGTCAAAGAAGACTGCAAAGCC

[0451] An amino acid sequence of an alternative human ALK7 precursor protein, isoform 4 (NCBI Ref Seq NP_001104503.1), is shown as follows (SEQ ID NO: 309), where the signal peptide is indicated by a single underline.

| (SEQ ID NO: 309) | |
|---|---|
| 1 | MTRALCSALR QALLLLAAAA ELSPGLKCVC LLCDSSNFTC QTEGACWASV |
| | MLTNGKEQVI |
| 61 | KSCVSLPELN AQVFCHSSNN VTKTECCFTD FCNNITLHLP TDNGTWTQLW |
| | LVSEYHEQGS |
| 121 | LYDYLNRNIV TVAGMIKLAL SIASGLAHLH MEIVGTQGKP AIAHRDIKSK |
| | NILVKKCETC |
| 181 | AIADLGLAVK HDSILNTIDI PQNPKVGTKR YMAPEMLDDT MNVNIFESFK |
| | RADIYSVGLV |
| 241 | YWEIARRCSV GGIVEEYQLP YYDMVPSDPS IEEMRKVVCD QKFRPSIPNQ |
| | WQSCEALRVM |
| 301 | GRIMRECWYA NGAARLTALR IKKTISQLCV KEDCKA |

[0452] An amino acid sequence of a processed ALK7 polypeptide (isoform 4) is as follows (SEQ ID NO: 310). Like ALK7 isoform 3, isoform 4 lacks a transmembrane domain and is therefore proposed to be soluble in its entirety (Roberts et al., 2003, Biol Reprod 68:1719-1726). N-terminal variants of SEQ ID NO: 310 are predicted as described below.

| (SEQ ID NO: 310) | |
|---|---|
| 1 | ELSPGLKCVC LLCDSSNFTC QTEGACWASV MLTNGKEQVI KSCVSLPELN |
| | AQVFCHSSNN |
| 61 | VTKTECCFTD FCNNITLHLP TDNGTWTQLW LVSEYHEQGS LYDYLNRNIV |
| | TVAGMIKLAL |
| 121 | SIASGLAHLH MEIVGTQGKP AIAHRDIKSK NILVKKCETC AIADLGLAVK |
| | HDSILNTIDI |
| 181 | PQNPKVGTKR YMAPEMLDDT MNVNIFESFK RADIYSVGLV YWEIARRCSV |
| | GGIVEEYQLP |
| 240 | YYDMVPSDPS IEEMRKVVCD QKFRPSIPNQ WQSCEALRVM GRIMRECWYA |
| | NGAARLTALR |
| 301 | IKKTISQLCV KEDCKA |

[0453] A nucleic acid sequence encoding an unprocessed ALK7 polypeptide precursor protein (isoform 4) is shown below (SEQ ID NO: 311), corresponding to nucleotides 244-1244 of NCBI Reference Sequence NM_001111033.1. The signal sequence is indicated by solid underline.

(SEQ ID NO: 311)

ATGACCCGGGCGCTCTGCTCAGCGCTCCGCCAGGCTCTCCTGCTGCTCGC
AGCGGCCGCCGAGCTCTCGCCAGGACTGAAGTGTGTATGTCTTTTGTGTG
ATTCTTCAAACTTTACCTGCCAAACAGAAGGAGCATGTTGGGCATCAGTC
ATGCTAACCAATGGAAAAGAGCAGGTGATCAAATCCTGTGTCTCCCTTCC
AGAACTGAATGCTCAAGTCTTCTGTCATAGTTCCAACAATGTTACCAAAA
CCGAATGCTGCTTCACAGATTTTTGCAACAACATAACACTGCACCTTCCA
ACAGATAATGGAACTTGGACTCAACTTTGGCTGGTATCTGAATATCATGA
ACAGGGCTCCTTATATGACTATTTGAATAGAAATATAGTGACCGTGGCTG
GAATGATCAAGCTGGCGCTCTCAATTGCTAGTGGTCTGGCACACCTTCAT
ATGGAGATTGTTGGTACACAAGGTAAACCTGCTATTGCTCATCGAGACAT
AAAATCAAAGAATATCTTAGTGAAAAAGTGTGAAACTTGTGCCATAGCGG
ACTTAGGGTTGGCTGTGAAGCATGATTCAATACTGAACACTATCGACATA
CCTCAGAATCCTAAAGTGGGAACCAAGAGGTATATGGCTCCTGAAATGCT
TGATGATACAATGAATGTGAATATCTTTGAGTCCTTCAAACGAGCTGACA
TCTATTCTGTTGGTCTGGTTTACTGGGAAATAGCCCGGAGGTGTTCAGTC
GGAGGAATTGTTGAGGAGTACCAATTGCCTTATTATGACATGGTGCCTTC
AGATCCCTCGATAGAGGAAATGAGAAAGGTTGTTTGTGACCAGAAGTTTC
GACCAAGTATCCCAAACCAGTGGCAAAGTTGTGAAGCACTCCGAGTCATG
GGGAGAATAATGCGTGAGTGTTGGTATGCCAACGGAGCGGCCCGCCTAAC
TGCTCTTCGTATTAAGAAGACTATATCTCAACTTTGTGTCAAAGAAGACT
GCAAAGCCTAA

[0454] A nucleic acid sequence encoding a processed ALK7 polypeptide (isoform 4) is as follows (SEQ ID NO: 312):

(SEQ ID NO: 312)

GAGCTCTCGCCAGGACTGAAGTGTGTATGTCTTTTGTGTGATTCTTCAAA
CTTTACCTGCCAAACAGAAGGAGCATGTTGGGCATCAGTCATGCTAACCA
ATGGAAAAGAGCAGGTGATCAAATCCTGTGTCTCCCTTCCAGAACTGAAT
GCTCAAGTCTTCTGTCATAGTTCCAACAATGTTACCAAAACCGAATGCTG
CTTCACAGATTTTTGCAACAACATAACACTGCACCTTCCAACAGATAATG
GAACTTGGACTCAACTTTGGCTGGTATCTGAATATCATGAACAGGGCTCC
TTATATGACTATTTGAATAGAAATATAGTGACCGTGGCTGGAATGATCAA
GCTGGCGCTCTCAATTGCTAGTGGTCTGGCACACCTTCATATGGAGATTG
TTGGTACACAAGGTAAACCTGCTATTGCTCATCGAGACATAAAATCAAAG
AATATCTTAGTGAAAAAGTGTGAAACTTGTGCCATAGCGGACTTAGGGTT
GGCTGTGAAGCATGATTCAATACTGAACACTATCGACATACCTCAGAATC
CTAAAGTGGGAACCAAGAGGTATATGGCTCCTGAAATGCTTGATGATACA
ATGAATGTGAATATCTTTGAGTCCTTCAAACGAGCTGACATCTATTCTGT
TGGTCTGGTTTACTGGGAAATAGCCCGGAGGTGTTCAGTCGGAGGAATTG
TTGAGGAGTACCAATTGCCTTATTATGACATGGTGCCTTCAGATCCCTCG
ATAGAGGAAATGAGAAAGGTTGTTTGTGACCAGAAGTTTCGACCAAGTAT
CCCAAACCAGTGGCAAAGTTGTGAAGCACTCCGAGTCATGGGGAGAATAA
TGCGTGAGTGTTGGTATGCCAACGGAGCGGCCCGCCTAACTGCTCTTCGT
ATTAAGAAGACTATATCTCAACTTTGTGTCAAAGAAGACTGCAAAGCCTA
A

[0455] Based on the signal sequence of full-length ALK7 (isoform 1) in the rat (see NCBI Reference Sequence NP_620790.1) and on the high degree of sequence identity between human and rat ALK7, it is predicted that a processed form of human ALK7 isoform 1 is as follows (SEQ ID NO: 313).

| (SEQ ID NO: 313) | |
|---|---|
| 1 | LKCVCLLCDS SNFTCQTEGA CWASVMLTNG KEQVIKSCVS LPELNAQVFC |
| | HSSNNVTKTE |
| 61 | CCFTDFCNNI TLHLPTASPN APKLGPME |

[0456] Active variants of processed ALK7 isoform 1 are predicted in which SEQ ID NO: 39 is truncated by 1, 2, 3, 4, 5, 6, or 7 amino acids at the N-terminus and SEQ ID NO: 313 is truncated by 1 or 2 amino acids at the N-terminus. Consistent with SEQ ID NO: 313, it is further expected that leucine is the N-terminal amino acid in the processed forms of human ALK7 isoform 3 (SEQ ID NO: 306) and human ALK7 isoform 4 (SEQ ID NO: 310). In certain embodiments, the disclosure relates to heteromultimers that comprise at least one ALK7 polypeptide, which includes fragments, functional variants, and modified forms thereof. Preferably, ALK7 polypeptides for use in accordance with inventions of the disclosure (e.g., heteromultimers comprising an ALK7 polypeptide and uses thereof) are soluble (e.g., an extracellular domain of ALK7). In other preferred embodiments, ALK7 polypeptides for use in accordance with the inventions of the disclosure bind to and/or inhibit (antagonize) activity (e.g., Smad signaling) of one or more TGF-beta superfamily ligands. In some embodiments, heteromultimers of the disclosure comprise at least one ALK7 polypeptide that is at least 70%, 70%, 75%, 80%, 85%, 90%, 91%, 92%, 93%, 94%, 95%, 96%, 97%, 98%, 99%, or 100% identical to the amino acid sequence of SEQ ID NO: 38, 39, 301, 302, 305, 306, 309, 310, or 313. In some embodiments, heteromultimers of the disclosure comprise at least one ALK7 polypeptide that is at least 70%, 75%, 80%, 85%, 90%, 91%, 92%, 93%, 94%, 95%, 96%, 97%, 98%, 99%, or 100% identical to a polypeptide that begins at any one of amino acids of 21-28 (e.g., amino acid residues 21, 22, 23, 24, 25, 26, 27, or 28) of SEQ ID NO: 38, and ends at any one of amino acids 92-113 (e.g., amino acid residues 92, 93, 94, 95, 96, 97, 98, 99, 100, 101, 102, 103, 104, 105, 106, 107, 108, 109, 110, 111, 112, or 113) of SEQ ID NO: 38. In some embodiments, heteromultimers of the disclosure comprise at least one ALK7 polypeptide that is at least 70%, 75%, 80%, 85%, 90%, 91%, 92%, 93%, 94%, 95%, 96%, 97%, 98%, 99%, or 100% identical to amino acids of 21-92 of SEQ ID NO: 38. In some embodiments, heteromultimers of the disclosure comprise at least one ALK7 polypeptide that is at least 70%, 75%, 80%, 85%, 90%, 91%, 92%, 93%, 94%, 95%, 96%, 97%, 98%, 99%, or 100% identical to amino acids of 21-113 of SEQ ID NO: 38. In some embodiments, heteromultimers of the disclosure comprise at least one ALK7 polypeptide that is at least 70%, 75%, 80%, 85%, 90%, 91%, 92%, 93%, 94%, 95%, 96%, 97%, 98%, 99%, or 100% identical to amino acids of 28-92 of SEQ ID NO: 38. In some embodiments, heteromultimers of the disclosure comprise at least one ALK7 polypeptide that is at least 70%, 75%, 80%, 85%, 90%, 91%, 92%, 93%, 94%, 95%, 96%, 97%, 98%, 99%, or 100% identical to amino acids of 28-113 of SEQ ID NO: 38. In some embodiments, heteromultimers of the disclosure comprise at least one ALK7 polypeptide that is at least 70%, 75%, 80%, 85%, 90%, 91%, 92%, 93%, 94%, 95%, 96%, 97%, 98%, 99%, or 100% identical to a polypeptide that begins at any one of amino acids of 1-13 (e.g., amino acid residues 1, 2, 3, 4, 5, 6, 7, 8, 9, 10, 11, 12, or 13) of SEQ ID NO: 301, and ends at any one of amino acids 42-63 (e.g., amino acid residues 42, 43, 44, 45, 46, 47, 48, 49, 50, 51, 52, 53, 54, 55, 56, 57, 58, 59, 60, 61, 62, or 63) of SEQ ID NO: 301. In some embodiments, heteromultimers of the disclosure comprise at least one ALK7 polypeptide that is at least 70%, 75%, 80%, 85%, 90%, 91%, 92%, 93%, 94%, 95%, 96%, 97%, 98%, 99%, or 100% identical to amino acids of 1-42 of SEQ ID NO: 301. In some embodiments, heteromultimers of the disclosure comprise at least one ALK7 polypeptide that is at least 70%, 75%, 80%, 85%, 90%, 91%, 92%, 93%, 94%, 95%, 96%, 97%, 98%, 99%, or 100% identical to amino acids of 1-63 of SEQ ID NO: 301. In some embodiments, heteromultimers of the disclosure comprise at least one ALK7 polypeptide that is at least 70%, 75%, 80%, 85%, 90%, 91%, 92%, 93%, 94%, 95%, 96%, 97%, 98%, 99%, or 100% identical to amino acids of 13-42 of SEQ ID NO: 301. In some embodiments, heteromultimers of the disclosure comprise at least one ALK7 polypeptide that is at least 70%, 75%, 80%, 85%, 90%, 91%, 92%, 93%, 94%, 95%, 96%, 97%, 98%, 99%, or 100% identical to amino acids of 13-63 of SEQ ID NO: 301. In some embodiments, heteromultimers of the disclosure comprise at least one ALK7 polypeptide that is at least 70%, 75%, 80%, 85%, 90%, 91%, 92%, 93%, 94%, 95%, 96%, 97%, 98%, 99%, or 100% identical to a polypeptide that begins at any one of amino acids of 21-28 (e.g., amino acid residues 21, 22, 23, 24, 25, 26, 27, or 28) of SEQ ID NO: 305, and ends at any one of amino acids 411-413 (e.g., amino acid residues 411, 412, or 413) of SEQ ID NO: 305. In some embodiments, heteromultimers of the disclosure comprise at least one ALK7 polypeptide that is at least 70%, 75%, 80%, 85%, 90%, 91%, 92%, 93%, 94%, 95%, 96%, 97%, 98%, 99%, or 100% identical to amino acids of 21-411 of SEQ ID NO: 305. In some embodiments, heteromultimers of the disclosure comprise at least one ALK7 polypeptide that is at least 70%, 75%, 80%, 85%, 90%, 91%, 92%, 93%, 94%, 95%, 96%, 97%, 98%, 99%, or 100% identical to amino acids of 21-413 of SEQ ID NO: 305. In some embodiments, heteromultimers of the disclosure comprise at least one ALK7 polypeptide that is at least 70%, 75%, 80%, 85%, 90%, 91%, 92%, 93%, 94%, 95%, 96%, 97%, 98%, 99%, or 100% identical to amino acids of 28-411 of SEQ ID NO: 305. In some embodiments, heteromultimers of the disclosure comprise at least one ALK7 polypeptide that is at least 70%, 75%, 80%, 85%, 90%, 91%, 92%, 93%, 94%, 95%, 96%, 97%, 98%, 99%, or 100% identical to amino acids of 28-413 of SEQ ID NO: 305. In some embodiments, heteromultimers of the disclosure comprise at least one ALK7 polypeptide that is at least 70%, 75%, 80%, 85%, 90%, 91%, 92%, 93%, 94%, 95%, 96%, 97%, 98%, 99%, or 100% identical to a polypeptide that begins at any one of amino acids of 21-28 (e.g., amino acid residues 21, 22, 23, 24, 25, 26, 27, or 28) of SEQ ID NO: 309, and ends at any one of amino acids 334-336 (e.g., amino acid residues 334, 335, or 336) of SEQ ID NO: 309. In some embodiments, heteromultimers of the disclosure comprise at least one ALK7 polypeptide that is at least 70%, 75%, 80%, 85%, 90%, 91%, 92%, 93%, 94%, 95%, 96%, 97%, 98%, 99%, or 100% identical to amino acids of 21-334 of SEQ ID NO: 309. In some embodiments, heteromultimers of the disclosure comprise at least one ALK7 polypeptide that is at least 70%, 75%, 80%, 85%, 90%, 91%, 92%, 93%, 94%, 95%, 96%, 97%, 98%, 99%, or 100% identical to amino acids of 21-336 of SEQ ID NO: 309. In some embodiments, heteromultimers of the disclosure comprise at least one ALK7 polypeptide that is at least 70%, 75%, 80%, 85%, 90%, 91%, 92%, 93%, 94%, 95%, 96%, 97%, 98%, 99%, or 100% identical to amino acids of 28-334 of SEQ ID NO: 309. In some embodiments, heteromultimers of the disclosure comprise at least one ALK7 polypeptide that is at least 70%, 75%, 80%, 85%, 90%, 91%, 92%, 93%, 94%, 95%, 96%, 97%, 98%, 99%, or 100% identical to amino acids of 28-336 of SEQ ID NO: 309.

[0457] The term “endoglin polypeptide” includes polypeptides comprising any naturally occurring endoglin protein (encoded by ENG or one of its nonhuman orthologs) as well as any variants thereof (including mutants, fragments, fusions, and peptidomimetic forms) that retain a useful activity.

[0458] The human endoglin isoform 1 precursor protein sequence (NCBI Ref Seq NP_001108225.1) is as follows:

| (SEQ ID NO: 501) | |
|---|---|
| 1 | MDRGTLPLAV ALLLASCSLS PTSLAETVHC DLQPVGPERG EVTYTTSQVS KGCVAQAPNA |
| 61 | ILEVHVLFLE FPTGPSQLEL TLQASKQNGT WPREVLLVLS VNSSVFLHLQ ALGIPLHLAY |
| 121 | NSSLVTFQEP PGVNTTELPS FPKTQILEWA AERGPITSAA ELNDPQSILL RLGQAQGSLS |
| 181 | FCMLEASQDM GRTLEWRPRT PALVRGCHLE GVAGHKEAHI LRVLPGHSAG PRTVTVKVEL |
| 241 | SCAPGDLDAV LILQGPPYVS WLIDANHNMQ IWTTGEYSFK IFPEKNIRGF KLPDTPQGLL |
| 301 | GEARMLNASI VASFVELPLA SIVSLHASSC GGRLQTSPAP IQTTPPKDTC SPELLMSLIQ |
| 361 | TKCADDAMTL VLKKELVAHL KCTITGLTFW DPSCEAEDRG DKFVLRSAYS SCGMQVSASM |
| 421 | ISNEAVVNIL SSSSPQRKKV HCLNMDSLSF QLGLYLSPHF LQASNTIEPG QQSFVQVRVS |
| 481 | PSVSEFLLQL DSCHLDLGPE GGTVELIQGR AAKGNCVSLL SPSPEGDPRF SFLLHFYTVP |
| 541 | [chemical structure] |
| 601 | [chemical structure] |

[0459] The signal peptide is indicated by single underline, the extracellular domain is indicated in bold font, and the transmembrane domain is indicated by dotted underline.

[0460] A processed extracellular endoglin polypeptide sequence (isoform 1) is as follows:

(SEQ ID NO: 502)

ETVHCDLQPVGPERGEVTYTTSQVSKGCVAQAPNAILEVHVLFLEFPTGP
SQLELTLQASKQNGTWPREVLLVLSVNSSVFLHLQALGIPLHLAYNSSLV
TFQEPPGVNTTELPSFPKTQILEWAAERGPITSAAELNDPQSILLRLGQA
QGSLSFCMLEASQDMGRTLEWRPRTPALVRGCHLEGVAGHKEAHILRVLP
GHSAGPRTVTVKVELSCAPGDLDAVLILQGPPYVSWLIDANHNMQIWTTG
EYSFKIFPEKNIRGFKLPDTPQGLLGEARMLNASIVASFVELPLASIVSL
HASSCGGRLQTSPAPIQTTPPKDTCSPELLMSLIQTKCADDAMTLVLKKE
LVAHLKCTITGLTFWDPSCEAEDRGDKFVLRSAYSSCGMQVSASMISNEA
VVNILSSSSPQRKKVHCLNMDSLSFQLGLYLSPHFLQASNTIEPGQQSFV
QVRVSPSVSEFLLQLDSCHLDLGPEGGTVELIQGRAAKGNCVSLLSPSPE
GDPRFSFLLHFYTVPIPKTGTLSCTVALRPKTGSQDQEVHRTVFMRLNII
SPDLSGCTSKG

[0461] A nucleic acid sequence encoding unprocessed human ENG isoform 1 precursor protein is shown below (SEQ ID NO: 503), corresponding to nucleotides 419-2392 of NCBI Reference Sequence NM_001114753.2. The signal sequence is underlined.

| (SEQ ID NO: 503) | |
|---|---|
| 1 | ATGGACCGCG GCACGCTCCC TCTGGCTGTT GCCCTGCTGC TGGCCAGCTG |
| 51 | CAGCCTCAGC CCCACAAGTC TTGCAGAAAC AGTCCATTGT GACCTTCAGC |
| 101 | CTGTGGGCCC CGAGAGGGGC GAGGTGACAT ATACCACTAG CCAGGTCTCG |
| 151 | AAGGGCTGCG TGGCTCAGGC CCCCAATGCC ATCCTTGAAG TCCATGTCCT |
| 201 | CTTCCTGGAG TTCCCAACGG GCCCGTCACA GCTGGAGCTG ACTCTCCAGG |
| 251 | CATCCAAGCA AAATGGCACC TGGCCCCGAG AGGTGCTTCT GGTCCTCAGT |
| 301 | GTAAACAGCA GTGTCTTCCT GCATCTCCAG GCCCTGGGAA TCCCACTGCA |
| 351 | CTTGGCCTAC AATTCCAGCC TGGTCACCTT CCAAGAGCCC CCGGGGGTCA |
| 401 | ACACCACAGA GCTGCCATCC TTCCCCAAGA CCCAGATCCT TGAGTGGGCA |
| 451 | GCTGAGAGGG GCCCCATCAC CTCTGCTGCT GAGCTGAATG ACCCCCAGAG |
| 501 | CATCCTCCTC CGACTGGGCC AAGCCCAGGG GTCACTGTCC TTCTGCATGC |
| 551 | TGGAAGCCAG CCAGGACATG GGCCGCACGC TCGAGTGGCG GCCGCGTACT |
| 601 | CCAGCCTTGG TCCGGGGCTG CCACTTGGAA GGCGTGGCCG GCCACAAGGA |
| 651 | GGCGCACATC CTGAGGGTCC TGCCGGGCCA CTCGGCCGGG CCCCGGACGG |
| 701 | TGACGGTGAA GGTGGAACTG AGCTGCGCAC CCGGGGATCT CGATGCCGTC |
| 751 | CTCATCCTGC AGGGTCCCCC CTACGTGTCC TGGCTCATCG ACGCCAACCA |
| 801 | CAACATGCAG ATCTGGACCA CTGGAGAATA CTCCTTCAAG ATCTTTCCAG |
| 851 | AGAAAAACAT TCGTGGCTTC AAGCTCCCAG ACACACCTCA AGGCCTCCTG |
| 901 | GGGGAGGCCC GGATGCTCAA TGCCAGCATT GTGGCATCCT TCGTGGAGCT |
| 951 | ACCGCTGGCC AGCATTGTCT CACTTCATGC CTCCAGCTGC GGTGGTAGGC |
| 1001 | TGCAGACCTC ACCCGCACCG ATCCAGACCA CTCCTCCCAA GGACACTTGT |
| 1051 | AGCCCGGAGC TGCTCATGTC CTTGATCCAG ACAAAGTGTG CCGACGACGC |
| 1101 | CATGACCCTG GTACTAAAGA AAGAGCTTGT TGCGCATTTG AAGTGCACCA |
| 1151 | TCACGGGCCT GACCTTCTGG GACCCCAGCT GTGAGGCAGA GGACAGGGGT |
| 1201 | GACAAGTTTG TCTTGCGCAG TGCTTACTCC AGCTGTGGCA TGCAGGTGTC |
| 1251 | AGCAAGTATG ATCAGCAATG AGGCGGTGGT CAATATCCTG TCGAGCTCAT |
| 1301 | CACCACAGCG GAAAAAGGTG CACTGCCTCA ACATGGACAG CCTCTCTTTC |
| 1351 | CAGCTGGGCC TCTACCTCAG CCCACACTTC CTCCAGGCCT CCAACACCAT |
| 1401 | CGAGCCGGGG CAGCAGAGCT TTGTGCAGGT CAGAGTGTCC CCATCCGTCT |
| 1451 | CCGAGTTCCT GCTCCAGTTA GACAGCTGCC ACCTGGACTT GGGGCCTGAG |
| 1501 | GGAGGCACCG TGGAACTCAT CCAGGGCCGG GCGGCCAAGG GCAACTGTGT |
| 1551 | GAGCCTGCTG TCCCCAAGCC CCGAGGGTGA CCCGCGCTTC AGCTTCCTCC |
| 1601 | TCCACTTCTA CACAGTACCC ATACCCAAAA CCGGCACCCT CAGCTGCACG |
| 1651 | GTAGCCCTGC GTCCCAAGAC CGGGTCTCAA GACCAGGAAG TCCATAGGAC |
| 1701 | TGTCTTCATG CGCTTGAACA TCATCAGCCC TGACCTGTCT GGTTGCACAA |
| 1751 | GCAAAGGCCT CGTCCTGCCC GCCGTGCTGG GCATCACCTT TGGTGCCTTC |
| 1801 | CTCATCGGGG CCCTGCTCAC TGCTGCACTC TGGTACATCT ACTCGCACAC |
| 1851 | GCGTTCCCCC AGCAAGCGGG AGCCCGTGGT GGCGGTGGCT GCCCCGGCCT |
| 1901 | CCTCGGAGAG CAGCAGCACC AACCACAGCA TCGGGAGCAC CCAGAGCACC |
| 1951 | CCCTGCTCCA CCAGCAGCAT GGCA |

[0462] A nucleic acid sequence encoding a processed extracellular ENG isoform1 polypeptide is as follows (SEQ ID NO: 504):

(SEQ ID NO: 504)

GAAACAGTCCATTGTGACCTTCAGCCTGTGGGCCCCGAGAGGGGCGAGGT
GACATATACCACTAGCCAGGTCTCGAAGGGCTGCGTGGCTCAGGCCCCCA
ATGCCATCCTTGAAGTCCATGTCCTCTTCCTGGAGTTCCCAACGGGCCCG
TCACAGCTGGAGCTGACTCTCCAGGCATCCAAGCAAAATGGCACCTGGCC
CCGAGAGGTGCTTCTGGTCCTCAGTGTAAACAGCAGTGTCTTCCTGCATC
TCCAGGCCCTGGGAATCCCACTGCACTTGGCCTACAATTCCAGCCTGGTC
ACCTTCCAAGAGCCCCCGGGGGTCAACACCACAGAGCTGCCATCCTTCCC
CAAGACCCAGATCCTTGAGTGGGCAGCTGAGAGGGGCCCCATCACCTCTG
CTGCTGAGCTGAATGACCCCCAGAGCATCCTCCTCCGACTGGGCCAAGCC
CAGGGGTCACTGTCCTTCTGCATGCTGGAAGCCAGCCAGGACATGGGCCG
CACGCTCGAGTGGCGGCCGCGTACTCCAGCCTTGGTCCGGGGCTGCCACT
TGGAAGGCGTGGCCGGCCACAAGGAGGCGCACATCCTGAGGGTCCTGCCG
GGCCACTCGGCCGGGCCCCGGACGGTGACGGTGAAGGTGGAACTGAGCTG
CGCACCCGGGGATCTCGATGCCGTCCTCATCCTGCAGGGTCCCCCCTACG
TGTCCTGGCTCATCGACGCCAACCACAACATGCAGATCTGGACCACTGGA
GAATACTCCTTCAAGATCTTTCCAGAGAAAAACATTCGTGGCTTCAAGCT
CCCAGACACACCTCAAGGCCTCCTGGGGGAGGCCCGGATGCTCAATGCCA
GCATTGTGGCATCCTTCGTGGAGCTACCGCTGGCCAGCATTGTCTCACTT
CATGCCTCCAGCTGCGGTGGTAGGCTGCAGACCTCACCCGCACCGATCCA
GACCACTCCTCCCAAGGACACTTGTAGCCCGGAGCTGCTCATGTCCTTGA
TCCAGACAAAGTGTGCCGACGACGCCATGACCCTGGTACTAAAGAAAGAG
CTTGTTGCGCATTTGAAGTGCACCATCACGGGCCTGACCTTCTGGGACCC
CAGCTGTGAGGCAGAGGACAGGGGTGACAAGTTTGTCTTGCGCAGTGCTT
ACTCCAGCTGTGGCATGCAGGTGTCAGCAAGTATGATCAGCAATGAGGCG
GTGGTCAATATCCTGTCGAGCTCATCACCACAGCGGAAAAAGGTGCACTG
CCTCAACATGGACAGCCTCTCTTTCCAGCTGGGCCTCTACCTCAGCCCAC
ACTTCCTCCAGGCCTCCAACACCATCGAGCCGGGGCAGCAGAGCTTTGTG
CAGGTCAGAGTGTCCCCATCCGTCTCCGAGTTCCTGCTCCAGTTAGACAG
CTGCCACCTGGACTTGGGGCCTGAGGGAGGCACCGTGGAACTCATCCAGG
GCCGGGCGGCCAAGGGCAACTGTGTGAGCCTGCTGTCCCCAAGCCCCGAG
GGTGACCCGCGCTTCAGCTTCCTCCTCCACTTCTACACAGTACCCATACC
CAAAACCGGCACCCTCAGCTGCACGGTAGCCCTGCGTCCCAAGACCGGGT
CTCAAGACCAGGAAGTCCATAGGACTGTCTTCATGCGCTTGAACATCATC
AGCCCTGACCTGTCTGGTTGCACAAGCAAAGGC

[0463] The human endoglin isoform 2 precursor protein sequence (NCBI Ref Seq NP_000109.1) is as follows:

| | (SEQ ID NO: 505) |
|---|---|
| 1 | MDRGTLPLAV ALLLASCSLS PTSLAETVHC DLQPVGPERG EVTYTTSQVS KGCVAQAPNA |
| 61 | ILEVHVLFLE FPTGPSQLEL TLQASKQNGT WPREVLLVLS VNSSVFLHLQ ALGIPLHLAY |
| 121 | NSSLVTFQEP PGVNTTELPS FPKTQILEWA AERGPITSAA ELNDPQSILL RLGQAQGSLS |
| 181 | FCMLEASQDM GRTLEWRPRT PALVRGCHLE GVAGHKEAHI LRVLPGHSAG PRTVTVKVEL |
| 241 | SCAPGDLDAV LILQGPPYVS WLIDANHNMQ IWTTGEYSFK IFPEKNIRGF KLPDTPQGLL |
| 301 | GEARMLNASI VASFVELPLA SIVSLHASSC GGRLQTSPAP IQTTPPKDTC SPELLMSLIQ |
| 361 | TKCADDAMTL VLKKELVAHL KCTITGLTFW DPSCEAEDRG DKFVLRSAYS SCGMQVSASM |
| 421 | ISNEAVVNIL SSSSPQRKKV HCLNMDSLSF QLGLYLSPHF LQASNTIEPG QQSFVQVRVS |
| 481 | PSVSEFLLQL DSCHLDLGPE GGTVELIQGR AAKGNCVSLL SPSPEGDPRF SFLLHFYTVP |
| 541 | [chemical structure] |
| 601 | [chemical structure] |

[0464] The signal peptide is indicated by single underline, the extracellular domain is indicated in bold font, and the transmembrane domain is indicated by dotted underline. The endoglin isoform 2 has a shortened and distinct intracellular domain compared to endoglin isoform 1 and an unchanged extracellular domain compared to endoglin isoform 1.

[0465] A processed extracellular endoglin polypeptide sequence (isoform 2) is as follows:

(SEQ ID NO: 506)

ETVHCDLQPVGPERGEVTYTTSQVSKGCVAQAPNAILEVHVLFLEFPTGP
SQLELTLQASKQNGTWPREVLLVLSVNSSVFLHLQALGIPLHLAYNSSLV
TFQEPPGVNTTELPSFPKTQILEWAAERGPITSAAELNDPQSILLRLGQA
QGSLSFCMLEASQDMGRTLEWRPRTPALVRGCHLEGVAGHKEAHILRVLP
GHSAGPRTVTVKVELSCAPGDLDAVLILQGPPYVSWLIDANHNMQIWTTG
EYSFKIFPEKNIRGFKLPDTPQGLLGEARMLNASIVASFVELPLASIVSL
HASSCGGRLQTSPAPIQTTPPKDTCSPELLMSLIQTKCADDAMTLVLKKE
LVAHLKCTITGLTFWDPSCEAEDRGDKFVLRSAYSSCGMQVSASMISNEA
VVNILSSSSPQRKKVHCLNMDSLSFQLGLYLSPHFLQASNTIEPGQQSFV
QVRVSPSVSEFLLQLDSCHLDLGPEGGTVELIQGRAAKGNCVSLLSPSPE
GDPRFSFLLHFYTVPIPKTGTLSCTVALRPKTGSQDQEVHRTVFMRLNII
SPDLSGCTSKG

[0466] A nucleic acid sequence encoding unprocessed human ENG isoform 2 precursor protein is shown below (SEQ ID NO: 507), corresponding to nucleotides 419-2293 of NCBI Reference Sequence NM_000118.3. The signal sequence is underlined.

(SEQ ID NO: 507)

ATGGACCGCGGCACGCTCCCTCTGGCTGTTGCCCTGCTGCTGGCCAGCTG
CAGCCTCAGCCCCACAAGTCTTGCAGAAACAGTCCATTGTGACCTTCAGC
CTGTGGGCCCCGAGAGGGGCGAGGTGACATATACCACTAGCCAGGTCTCG
AAGGGCTGCGTGGCTCAGGCCCCCAATGCCATCCTTGAAGTCCATGTCCT
CTTCCTGGAGTTCCCAACGGGCCCGTCACAGCTGGAGCTGACTCTCCAGG
CATCCAAGCAAAATGGCACCTGGCCCCGAGAGGTGCTTCTGGTCCTCAGT
GTAAACAGCAGTGTCTTCCTGCATCTCCAGGCCCTGGGAATCCCACTGCA
CTTGGCCTACAATTCCAGCCTGGTCACCTTCCAAGAGCCCCCGGGGGTCA
ACACCACAGAGCTGCCATCCTTCCCCAAGACCCAGATCCTTGAGTGGGCA
GCTGAGAGGGGCCCCATCACCTCTGCTGCTGAGCTGAATGACCCCCAGAG
CATCCTCCTCCGACTGGGCCAAGCCCAGGGGTCACTGTCCTTCTGCATGC
TGGAAGCCAGCCAGGACATGGGCCGCACGCTCGAGTGGCGGCCGCGTACT
CCAGCCTTGGTCCGGGGCTGCCACTTGGAAGGCGTGGCCGGCCACAAGGA
GGCGCACATCCTGAGGGTCCTGCCGGGCCACTCGGCCGGGCCCCGGACGG
TGACGGTGAAGGTGGAACTGAGCTGCGCACCCGGGGATCTCGATGCCGTC
CTCATCCTGCAGGGTCCCCCCTACGTGTCCTGGCTCATCGACGCCAACCA
CAACATGCAGATCTGGACCACTGGAGAATACTCCTTCAAGATCTTTCCAG
AGAAAAACATTCGTGGCTTCAAGCTCCCAGACACACCTCAAGGCCTCCTG
GGGGAGGCCCGGATGCTCAATGCCAGCATTGTGGCATCCTTCGTGGAGCT
ACCGCTGGCCAGCATTGTCTCACTTCATGCCTCCAGCTGCGGTGGTAGGC
TGCAGACCTCACCCGCACCGATCCAGACCACTCCTCCCAAGGACACTTGT
AGCCCGGAGCTGCTCATGTCCTTGATCCAGACAAAGTGTGCCGACGACGC
CATGACCCTGGTACTAAAGAAAGAGCTTGTTGCGCATTTGAAGTGCACCA
TCACGGGCCTGACCTTCTGGGACCCCAGCTGTGAGGCAGAGGACAGGGGT
GACAAGTTTGTCTTGCGCAGTGCTTACTCCAGCTGTGGCATGCAGGTGTC
AGCAAGTATGATCAGCAATGAGGCGGTGGTCAATATCCTGTCGAGCTCAT
CACCACAGCGGAAAAAGGTGCACTGCCTCAACATGGACAGCCTCTCTTTC
CAGCTGGGCCTCTACCTCAGCCCACACTTCCTCCAGGCCTCCAACACCAT
CGAGCCGGGGCAGCAGAGCTTTGTGCAGGTCAGAGTGTCCCCATCCGTCT
CCGAGTTCCTGCTCCAGTTAGACAGCTGCCACCTGGACTTGGGGCCTGAG
GGAGGCACCGTGGAACTCATCCAGGGCCGGGCGGCCAAGGGCAACTGTGT
GAGCCTGCTGTCCCCAAGCCCCGAGGGTGACCCGCGCTTCAGCTTCCTCC
TCCACTTCTACACAGTACCCATACCCAAAACCGGCACCCTCAGCTGCACG
GTAGCCCTGCGTCCCAAGACCGGGTCTCAAGACCAGGAAGTCCATAGGAC
TGTCTTCATGCGCTTGAACATCATCAGCCCTGACCTGTCTGGTTGCACAA
GCAAAGGCCTCGTCCTGCCCGCCGTGCTGGGCATCACCTTTGGTGCCTTC
CTCATCGGGGCCCTGCTCACTGCTGCACTCTGGTACATCTACTCGCACAC
GCGTGAGTACCCCAGGCCCCCACAG

[0467] A nucleic acid sequence encoding a processed extracellular ENG isoform 2 polypeptide is as follows (SEQ ID NO: 508):

(SEQ ID NO: 508)

GAAACAGTCCATTGTGACCTTCAGCCTGTGGGCCCCGAGAGGGGCGAGGT
GACATATACCACTAGCCAGGTCTCGAAGGGCTGCGTGGCTCAGGCCCCCA
ATGCCATCCTTGAAGTCCATGTCCTCTTCCTGGAGTTCCCAACGGGCCCG
TCACAGCTGGAGCTGACTCTCCAGGCATCCAAGCAAAATGGCACCTGGCC
CCGAGAGGTGCTTCTGGTCCTCAGTGTAAACAGCAGTGTCTTCCTGCATC
TCCAGGCCCTGGGAATCCCACTGCACTTGGCCTACAATTCCAGCCTGGTC
ACCTTCCAAGAGCCCCCGGGGGTCAACACCACAGAGCTGCCATCCTTCCC
CAAGACCCAGATCCTTGAGTGGGCAGCTGAGAGGGGCCCCATCACCTCTG
CTGCTGAGCTGAATGACCCCCAGAGCATCCTCCTCCGACTGGGCCAAGCC
CAGGGGTCACTGTCCTTCTGCATGCTGGAAGCCAGCCAGGACATGGGCCG
CACGCTCGAGTGGCGGCCGCGTACTCCAGCCTTGGTCCGGGGCTGCCACT
TGGAAGGCGTGGCCGGCCACAAGGAGGCGCACATCCTGAGGGTCCTGCCG
GGCCACTCGGCCGGGCCCCGGACGGTGACGGTGAAGGTGGAACTGAGCTG
CGCACCCGGGGATCTCGATGCCGTCCTCATCCTGCAGGGTCCCCCCTACG
TGTCCTGGCTCATCGACGCCAACCACAACATGCAGATCTGGACCACTGGA
GAATACTCCTTCAAGATCTTTCCAGAGAAAAACATTCGTGGCTTCAAGCT
CCCAGACACACCTCAAGGCCTCCTGGGGGAGGCCCGGATGCTCAATGCCA
GCATTGTGGCATCCTTCGTGGAGCTACCGCTGGCCAGCATTGTCTCACTT
CATGCCTCCAGCTGCGGTGGTAGGCTGCAGACCTCACCCGCACCGATCCA
GACCACTCCTCCCAAGGACACTTGTAGCCCGGAGCTGCTCATGTCCTTGA
TCCAGACAAAGTGTGCCGACGACGCCATGACCCTGGTACTAAAGAAAGAG
CTTGTTGCGCATTTGAAGTGCACCATCACGGGCCTGACCTTCTGGGACCC
CAGCTGTGAGGCAGAGGACAGGGGTGACAAGTTTGTCTTGCGCAGTGCTT
ACTCCAGCTGTGGCATGCAGGTGTCAGCAAGTATGATCAGCAATGAGGCG
GTGGTCAATATCCTGTCGAGCTCATCACCACAGCGGAAAAAGGTGCACTG
CCTCAACATGGACAGCCTCTCTTTCCAGCTGGGCCTCTACCTCAGCCCAC
ACTTCCTCCAGGCCTCCAACACCATCGAGCCGGGGCAGCAGAGCTTTGTG
CAGGTCAGAGTGTCCCCATCCGTCTCCGAGTTCCTGCTCCAGTTAGACAG
CTGCCACCTGGACTTGGGGCCTGAGGGAGGCACCGTGGAACTCATCCAGG
GCCGGGCGGCCAAGGGCAACTGTGTGAGCCTGCTGTCCCCAAGCCCCGAG
GGTGACCCGCGCTTCAGCTTCCTCCTCCACTTCTACACAGTACCCATACC
CAAAACCGGCACCCTCAGCTGCACGGTAGCCCTGCGTCCCAAGACCGGGT
CTCAAGACCAGGAAGTCCATAGGACTGTCTTCATGCGCTTGAACATCATC
AGCCCTGACCTGTCTGGTTGCACAAGCAAAGGC

[0468] An alternative processed extracellular endoglin polypeptide sequence (from either isoform 1 or isoform 2) is as follows:

(SEQ ID NO: 593)

ETVHCDLQPVGPERGEVTYTTSQVSKGCVAQAPNAILEVHVLFLEFPTGP
SQLELTLQASKQNGTWPREVLLVLSVNSSVFLHLQALGIPLHLAYNSSLV
TFQEPPGVNTTELPSFPKTQILEWAAERGPITSAAELNDPQSILLRLGQA
QGSLSFCMLEASQDMGRTLEWRPRTPALVRGCHLEGVAGHKEAHILRVLP
GHSAGPRTVTVKVELSCAPGDLDAVLILQGPPYVSWLIDANHNMQIWTTG
EYSFKIFPEKNIRGFKLPDTPQGLLGEARMLNASIVASFVELPLASIVSL
HASSCGGRLQTSPAPIQTTPP

[0469] A nucleic acid sequence encoding this alternative processed extracellular ENG polypeptide is as follows (SEQ ID NO: 594):

(SEQ ID NO: 594)

GAAACAGTCCATTGTGACCTTCAGCCTGTGGGCCCCGAGAGGGGCGAGGT
GACATATACCACTAGCCAGGTCTCGAAGGGCTGCGTGGCTCAGGCCCCCA
ATGCCATCCTTGAAGTCCATGTCCTCTTCCTGGAGTTCCCAACGGGCCCG
TCACAGCTGGAGCTGACTCTCCAGGCATCCAAGCAAAATGGCACCTGGCC
CCGAGAGGTGCTTCTGGTCCTCAGTGTAAACAGCAGTGTCTTCCTGCATC
TCCAGGCCCTGGGAATCCCACTGCACTTGGCCTACAATTCCAGCCTGGTC
ACCTTCCAAGAGCCCCCGGGGGTCAACACCACAGAGCTGCCATCCTTCCC
CAAGACCCAGATCCTTGAGTGGGCAGCTGAGAGGGGCCCCATCACCTCTG
CTGCTGAGCTGAATGACCCCCAGAGCATCCTCCTCCGACTGGGCCAAGCC
CAGGGGTCACTGTCCTTCTGCATGCTGGAAGCCAGCCAGGACATGGGCCG
CACGCTCGAGTGGCGGCCGCGTACTCCAGCCTTGGTCCGGGGCTGCCACT
TGGAAGGCGTGGCCGGCCACAAGGAGGCGCACATCCTGAGGGTCCTGCCG
GGCCACTCGGCCGGGCCCCGGACGGTGACGGTGAAGGTGGAACTGAGCTG
CGCACCCGGGGATCTCGATGCCGTCCTCATCCTGCAGGGTCCCCCCTACG
TGTCCTGGCTCATCGACGCCAACCACAACATGCAGATCTGGACCACTGGA
GAATACTCCTTCAAGATCTTTCCAGAGAAAAACATTCGTGGCTTCAAGCT
CCCAGACACACCTCAAGGCCTCCTGGGGGAGGCCCGGATGCTCAATGCCA
GCATTGTGGCATCCTTCGTGGAGCTACCGCTGGCCAGCATTGTCTCACTT
CATGCCTCCAGCTGCGGTGGTAGGCTGCAGACCTCACCCGCACCGATCCA
GACCACTCCTCCC

[0470] The human endoglin isoform 3 protein sequence (NCBI Ref Seq NP_001265067.1) is as follows:

| | (SEQ ID NO: 509) |
|---|---|
| 1 | MLEASQDMGR TLEWRPRTPA LVRGCHLEGV AGHKEAHILR VLPGHSAGPR TVTVKVELSC |
| 61 | APGDLDAVLI LQGPPYVSWL IDANHNMQIW TTGEYSFKIF PEKNIRGFKL PDTPQGLLGE |
| 121 | ARMLNASIVA SFVELPLASI VSLHASSCGG RLQTSPAPIQ TTPPKDTCSP ELLMSLIQTK |
| 181 | CADDAMTLVL KKELVAHLKC TITGLTFWDP SCEAEDRGDK FVLRSAYSSC GMQVSASMIS |
| 241 | NEAVVNILSS SSPQRKKVHC LMMDSLSFQL GLYLSPHFLQ ASNTIEPGQQ SFVQVRVSPS |
| 301 | VSEFLLQLDS CHLDLGPEGG TVELIQGRAA KGNCVSLLSP SPEGDPRFSF LLHFYTVPIP |
| 361 | [chemical structure] |
| 421 | [chemical structure] |

[0471] The extracellular domain is indicated in bold font, and the transmembrane domain is indicated by dotted underline. The endoglin isoform 3 has a distinct 5′ untranslated region, lacks a portion of the 5′ coding region, and uses a downstream start codon compared to endoglin isoform 1.

[0472] A processed extracellular endoglin polypeptide sequence (isoform 3) is as follows:

(SEQ ID NO: 510)

MLEASQDMGRTLEWRPRTPALVRGCHLEGVAGHKEAHILRVLPGHSAGPR
TVTVKVELSCAPGDLDAVLILQGPPYVSWLIDANHNMQIWTTGEYSFKIF
PEKNIRGFKLPDTPQGLLGEARMLNASIVASFVELPLASIVSLHASSCGG
RLQTSPAPIQTTPPKDTCSPELLMSLIQTKCADDAMTLVLKKELVAHLKC
TITGLTFWDPSCEAEDRGDKFVLRSAYSSCGMQVSASMISNEAVVNILSS
SSPQRKKVHCLNMDSLSFQLGLYLSPHFLQASNTIEPGQQSFVQVRVSPS
VSEFLLQLDSCHLDLGPEGGTVELIQGRAAKGNCVSLLSPSPEGDPRFSF
LLHFYTVPIPKTGTLSCTVALRPKTGSQDQEVHRTVFMRLNIISPDLSGC
TSKG

[0473] A nucleic acid sequence encoding human ENG isoform 3 protein is shown below (SEQ ID NO: 511), corresponding to nucleotides 705-2132 of NCBI Reference Sequence NM_001278138.1. The transmembrane region is indicated by dotted underline.

(SEQ ID NO: 511)
ATGCTGGAAGCCAGCCAGGACATGGGCCGCACGCTCGAGTGGCGGCCGCGTACTCCAGCCTTGGTCCGGGGCTGC
CACTTGGAAGGCGTGGCCGGCCACAAGGAGGCGCACATCCTGAGGGTCCTGCCGGGCCACTCGGCCGGGCCCCGG
ACGGTGACGGTGAAGGTGGAACTGAGCTGCGCACCCGGGGATCTCGATGCCGTCCTCATCCTGCAGGGTCCCCCC
TACGTGTCCTGGCTCATCGACGCCAACCACAACATGCAGATCTGGACCACTGGAGAATACTCCTTCAAGATCTTT
CCAGAGAAAAACATTCGTGGCTTCAAGCTCCCAGACACACCTCAAGGCCTCCTGGGGGAGGCCCGGATGCTCAAT
GCCAGCATTGTGGCATCCTTCGTGGAGCTACCGCTGGCCAGCATTGTCTCACTTCATGCCTCCAGCTGCGGTGGT
AGGCTGCAGACCTCACCCGCACCGATCCAGACCACTCCTCCCAAGGACACTTGTAGCCCGGAGCTGCTCATGTCC
TTGATCCAGACAAAGTGTGCCGACGACGCCATGACCCTGGTACTAAAGAAAGAGCTTGTTGCGCATTTGAAGTGC
ACCATCACGGGCCTGACCTTCTGGGACCCCAGCTGTGAGGCAGAGGACAGGGGTGACAAGTTTGTCTTGCGCAGT
GCTTACTCCAGCTGTGGCATGCAGGTGTCAGCAAGTATGATCAGCAATGAGGCGGTGGTCAATATCCTGTCGAGC
TCATCACCACAGCGGAAAAAGGTGCACTGCCTCAACATGGACAGCCTCTCTTTCCAGCTGGGCCTCTACCTCAGC
CCACACTTCCTCCAGGCCTCCAACACCATCGAGCCGGGGCAGCAGAGCTTTGTGCAGGTCAGAGTGTCCCCATCC
GTCTCCGAGTTCCTGCTCCAGTTAGACAGCTGCCACCTGGACTTGGGGCCTGAGGGAGGCACCGTGGAACTCATC
CAGGGCCGGGCGGCCAAGGGCAACTGTGTGAGCCTGCTGTCCCCAAGCCCCGAGGGTGACCCGCGCTTCAGCTTC
CTCCTCCACTTCTACACAGTACCCATACCCAAAACCGGCACCCTCAGCTGCACGGTAGCCCTGCGTCCCAAGACC
GGGTCTCAAGACCAGGAAGTCCATAGGACTGTCTTCATGCGCTTGAACATCATCAGCCCTGACCTGTCTGGTTGC

[chemical structure]

[chemical structure]

GCCTCCTCGGAGAGCAGCAGCACCAACCACAGCATCGGGAGCACCCAGAGCACCCCCTGCTCCACCAGCAGCATG
GCA

[0474] A nucleic acid sequence encoding a processed extracellular ENG isoform 3 polypeptide is as follows (SEQ ID NO: 512):

(SEQ ID NO: 512)

ATGCTGGAAGCCAGCCAGGACATGGGCCGCACGCTCGAGTGGCGGCCGCG
TACTCCAGCCTTGGTCCGGGGCTGCCACTTGGAAGGCGTGGCCGGCCACA
AGGAGGCGCACATCCTGAGGGTCCTGCCGGGCCACTCGGCCGGGCCCCGG
ACGGTGACGGTGAAGGTGGAACTGAGCTGCGCACCCGGGGATCTCGATGC
CGTCCTCATCCTGCAGGGTCCCCCCTACGTGTCCTGGCTCATCGACGCCA
ACCACAACATGCAGATCTGGACCACTGGAGAATACTCCTTCAAGATCTTT
CCAGAGAAAAACATTCGTGGCTTCAAGCTCCCAGACACACCTCAAGGCCT
CCTGGGGGAGGCCCGGATGCTCAATGCCAGCATTGTGGCATCCTTCGTGG
AGCTACCGCTGGCCAGCATTGTCTCACTTCATGCCTCCAGCTGCGGTGGT
AGGCTGCAGACCTCACCCGCACCGATCCAGACCACTCCTCCCAAGGACAC
TTGTAGCCCGGAGCTGCTCATGTCCTTGATCCAGACAAAGTGTGCCGACG
ACGCCATGACCCTGGTACTAAAGAAAGAGCTTGTTGCGCATTTGAAGTGC
ACCATCACGGGCCTGACCTTCTGGGACCCCAGCTGTGAGGCAGAGGACAG
GGGTGACAAGTTTGTCTTGCGCAGTGCTTACTCCAGCTGTGGCATGCAGG
TGTCAGCAAGTATGATCAGCAATGAGGCGGTGGTCAATATCCTGTCGAGC
TCATCACCACAGCGGAAAAAGGTGCACTGCCTCAACATGGACAGCCTCTC
TTTCCAGCTGGGCCTCTACCTCAGCCCACACTTCCTCCAGGCCTCCAACA
CCATCGAGCCGGGGCAGCAGAGCTTTGTGCAGGTCAGAGTGTCCCCATCC
GTCTCCGAGTTCCTGCTCCAGTTAGACAGCTGCCACCTGGACTTGGGGCC
TGAGGGAGGCACCGTGGAACTCATCCAGGGCCGGGCGGCCAAGGGCAACT
GTGTGAGCCTGCTGTCCCCAAGCCCCGAGGGTGACCCGCGCTTCAGCTTC
CTCCTCCACTTCTACACAGTACCCATACCCAAAACCGGCACCCTCAGCTG
CACGGTAGCCCTGCGTCCCAAGACCGGGTCTCAAGACCAGGAAGTCCATA
GGACTGTCTTCATGCGCTTGAACATCATCAGCCCTGACCTGTCTGGTTGC

[0475] In certain embodiments, the disclosure relates to heteromultimers that comprise at least one endoglin polypeptide, which includes fragments, functional variants, and modified forms thereof. Preferably, endoglin polypeptides for use in accordance with the disclosure (e.g., heteromultimers comprising an endoglin polypeptide and uses thereof) are soluble (e.g., an extracellular domain of endoglin). In other preferred embodiments, endoglin polypeptides for use in accordance with the disclosure bind to and/or inhibit (antagonize) activity (e.g., Smad signaling) of one or more TGF-beta superfamily ligands. In some embodiments, heteromultimers of the disclosure comprise at least one endoglin polypeptide that is at least 70%, 75%, 80%, 85%, 90%, 91%, 92%, 93%, 94%, 95%, 96%, 97%, 98%, 99%, or 100% identical to the amino acid sequence of SEQ ID NOs: 501, 502, 505, 506, 509, 510, or 593. In some embodiments, heteromultimers of the disclosure comprise at least one endoglin polypeptide that is at least 70%, 75%, 80%, 85%, 90%, 91%, 92%, 93%, 94%, 95%, 96%, 97%, 98%, 99%, or 100% identical to a polypeptide that begins at any one of amino acids of 26-30 (e.g., amino acid residues 26, 27, 28, 29, or 30) of SEQ ID NO: 501, and ends at any one of amino acids 330-346 (e.g., amino acid residues 330, 331, 332, 333, 334, 335, 336, 337, 338, 339, 340, 341, 342, 343, 344, 345, or 346) of SEQ ID NO: 501. In some embodiments, heteromultimers of the disclosure comprise at least one endoglin polypeptide that is at least 70%, 75%, 80%, 85%, 90%, 91%, 92%, 93%, 94%, 95%, 96%, 97%, 98%, 99%, or 100% identical to amino acids of 26-346 of SEQ ID NO: 501. In some embodiments, heteromultimers of the disclosure comprise at least one endoglin polypeptide that is at least 70%, 75%, 80%, 85%, 90%, 91%, 92%, 93%, 94%, 95%, 96%, 97%, 98%, 99%, or 100% identical to amino acids of 30-330 of SEQ ID NO: 501. In some embodiments, heteromultimers of the disclosure comprise at least one endoglin polypeptide that is at least 70%, 75%, 80%, 85%, 90%, 91%, 92%, 93%, 94%, 95%, 96%, 97%, 98%, 99%, or 100% identical to amino acids of 26-330 of SEQ ID NO: 501. In some embodiments, heteromultimers of the disclosure comprise at least one endoglin polypeptide that is at least 70%, 75%, 80%, 85%, 90%, 91%, 92%, 93%, 94%, 95%, 96%, 97%, 98%, 99%, or 100% identical to amino acids of 30-346 of SEQ ID NO: 501. In some embodiments, heteromultimers of the disclosure comprise at least one endoglin polypeptide that is at least 70%, 75%, 80%, 85%, 90%, 91%, 92%, 93%, 94%, 95%, 96%, 97%, 98%, 99%, or 100% identical to a polypeptide that begins at any one of amino acids of 26-30 (e.g., amino acid residues 26, 27, 28, 29, or 30) of SEQ ID NO: 505, and ends at any one of amino acids 330-346 (e.g., amino acid residues 330, 331, 332, 333, 334, 335, 336, 337, 338, 339, 340, 341, 342, 343, 344, 345, or 346) of SEQ ID NO: 505. In some embodiments, heteromultimers of the disclosure comprise at least one endoglin polypeptide that is at least 70%, 75%, 80%, 85%, 90%, 91%, 92%, 93%, 94%, 95%, 96%, 97%, 98%, 99%, or 100% identical to amino acids of 26-346 of SEQ ID NO: 505. In some embodiments, heteromultimers of the disclosure comprise least one endoglin polypeptide that is at least 70%, 75%, 80%, 85%, 90%, 91%, 92%, 93%, 94%, 95%, 96%, 97%, 98%, 99%, or 100% identical to amino acids of 30-330 of SEQ ID NO: 505. In some embodiments, heteromultimers of the disclosure comprise at least one endoglin polypeptide that is at least 70%, 75%, 80%, 85%, 90%, 91%, 92%, 93%, 94%, 95%, 96%, 97%, 98%, 99%, or 100% identical to amino acids of 26-330 of SEQ ID NO: 505. In some embodiments, heteromultimers of the disclosure comprise least one endoglin polypeptide that is at least 70%, 75%, 80%, 85%, 90%, 91%, 92%, 93%, 94%, 95%, 96%, 97%, 98%, 99%, or 100% identical to amino acids of 30-346 of SEQ ID NO: 505. In some embodiments, heteromultimers of the disclosure comprise at least one endoglin polypeptide that is at least 70%, 75%, 80%, 85%, 90%, 91%, 92%, 93%, 94%, 95%, 96%, 97%, 98%, 99%, or 100% identical to a polypeptide that begins at any one of amino acids of 1-25 (e.g., amino acid residues 1, 2, 3, 4, 5, 6, 7, 8, 9, 10, 11, 12, 13, 14, 15, 16, 17, 18, 19, 20, 21, 22, 23, 24, or 25) of SEQ ID NO: 509, and ends at any one of amino acids 148-164 (e.g., amino acid residues 148, 149, 150, 151, 152, 153, 154, 155, 156, 157, 158, 159, 160, 161, 162, 163, or 164) of SEQ ID NO: 509. In some embodiments, heteromultimers of the disclosure comprise at least one endoglin polypeptide that is at least 70%, 75%, 80%, 85%, 90%, 91%, 92%, 93%, 94%, 95%, 96%, 97%, 98%, 99%, or 100% identical to amino acids of 1-164 of SEQ ID NO: 509. In some embodiments, heteromultimers of the disclosure comprise at least one endoglin polypeptide that is at least 70%, 75%, 80%, 85%, 90%, 91%, 92%, 93%, 94%, 95%, 96%, 97%, 98%, 99%, or 100% identical to amino acids of 25-148 of SEQ ID NO: 509. In some embodiments, heteromultimers of the disclosure comprise at least one endoglin polypeptide that is at least 70%, 75%, 80%, 85%, 90%, 91%, 92%, 93%, 94%, 95%, 96%, 97%, 98%, 99%, or 100% identical to amino acids of 1-148 of SEQ ID NO: 509. In some embodiments, heteromultimers of the disclosure comprise at least one endoglin polypeptide that is at least 70%, 75%, 80%, 85%, 90%, 91%, 92%, 93%, 94%, 95%, 96%, 97%, 98%, 99%, or 100% identical to amino acids of 25-164 of SEQ ID NO: 509. In some embodiments, heteromultimers of the disclosure comprise at least one endoglin polypeptide that is at least 70%, 75%, 80%, 85%, 90%, 91%, 92%, 93%, 94%, 95%, 96%, 97%, 98%, 99%, or 100% identical to a polypeptide that begins at any one of amino acids of 26-30 (e.g., amino acid residues 26, 27, 28, 29, or 30) of SEQ ID NO: 501, and ends at any one of amino acids 582-586 (e.g., amino acid residues 582, 583, 584, 585, or 586) of SEQ ID NO: 501. In some embodiments, heteromultimers of the disclosure comprise at least one endoglin polypeptide that is at least 70%, 75%, 80%, 85%, 90%, 91%, 92%, 93%, 94%, 95%, 96%, 97%, 98%, 99%, or 100% identical to amino acids of 26-586 of SEQ ID NO: 501. In some embodiments, heteromultimers of the disclosure comprise at least one endoglin polypeptide that is at least 70%, 75%, 80%, 85%, 90%, 91%, 92%, 93%, 94%, 95%, 96%, 97%, 98%, 99%, or 100% identical to amino acids of 30-582 of SEQ ID NO: 501. In some embodiments, heteromultimers of the disclosure comprise at least one endoglin polypeptide that is at least 70%, 75%, 80%, 85%, 90%, 91%, 92%, 93%, 94%, 95%, 96%, 97%, 98%, 99%, or 100% identical to a polypeptide that begins at any one of amino acids of 26-30 (e.g., amino acid residues 26, 27, 28, 29, or 30) of SEQ ID NO: 505, and ends at any one of amino acids 582-586 (e.g., amino acid residues 582, 583, 584, 585, or 586) of SEQ ID NO: 505. In some embodiments, heteromultimers of the disclosure comprise at least one endoglin polypeptide that is at least 70%, 75%, 80%, 85%, 90%, 91%, 92%, 93%, 94%, 95%, 96%, 97%, 98%, 99%, or 100% identical to amino acids of 26-586 of SEQ ID NO: 505. In some embodiments, heteromultimers of the disclosure comprise at least one endoglin polypeptide that is at least 70%, 75%, 80%, 85%, 90%, 91%, 92%, 93%, 94%, 95%, 96%, 97%, 98%, 99%, or 100% identical to amino acids of 30-582 of SEQ ID NO: 505. In some embodiments, heteromultimers of the disclosure comprise at least one endoglin polypeptide that is at least 70%, 75%, 80%, 85%, 90%, 91%, 92%, 93%, 94%, 95%, 96%, 97%, 98%, 99%, or 100% identical to a polypeptide that begins at any one of amino acids of 1-25 (e.g., amino acid residues 1, 2, 3, 4, 5, 6, 7, 8, 9, 10, 11, 12, 13, 14, 15, 16, 17, 18, 19, 20, 21, 22, 23, 24, or 25) of SEQ ID NO: 509, and ends at any one of amino acids 400-404 (e.g., amino acid residues 400, 401, 402, or 403) of SEQ ID NO: 509. In some embodiments, heteromultimers of the disclosure comprise at least one endoglin polypeptide that is at least 70%, 75%, 80%, 85%, 90%, 91%, 92%, 93%, 94%, 95%, 96%, 97%, 98%, 99%, or 100% identical to amino acids of 1-404 of SEQ ID NO: 509. In some embodiments, heteromultimers of the disclosure comprise at least one endoglin polypeptide that is at least 70%, 75%, 80%, 85%, 90%, 91%, 92%, 93%, 94%, 95%, 96%, 97%, 98%, 99%, or 100% identical to amino acids of 25-400 of SEQ ID NO: 509.

[0476] The term “Cripto-1 polypeptide” includes polypeptides comprising any naturally occurring Cripto-1 protein (encoded by TDGF1 or one of its nonhuman orthologs) as well as any variants thereof (including mutants, fragments, fusions, and peptidomimetic forms) that retain a useful activity.

[0477] The human Cripto-1 isoform 1 precursor protein sequence (NCBI Ref Seq NP_003203.1) is as follows:

| (SEQ ID NO: 513) | |
|---|---|
| 1 | MDCRKMARFS YSVIWIMAIS KVFELGLVAG LGHQEFARPS RGYLAFRDDS IWPQEEPAIR |
| 61 | PRSSQRVPPM GIQHSKELNR TCCLNGGTCM LGSFCACPPS FYGRNCEHDV RKENCGSVPH |
| 121 | DTWLPKKCSL CKCWHGQLRC FPQAFLPGCD GLVMDEHLVA SRTPELPPSA RTTTFMLVGI |
| 181 | CLSIQSYY |

[0478] The signal peptide is indicated by single underline.

[0479] A processed Cripto-1 isoform 1 polypeptide sequence is as follows:

(SEQ ID NO: 514)

LGHQEFARPSRGYLAFRDDSIWPQEEPAIRPRSSQRVPPMGIQHSKELNR
TCCLNGGTCMLGSFCACPPSFYGRNCEHDVRKENCGSVPHDTWLPKKCSL
CKCWHGQLRCFPQAFLPGCDGLVMDEHLVAS

[0480] A nucleic acid sequence encoding unprocessed human Cripto-1 isoform 1 precursor protein is shown below (SEQ ID NO: 515), corresponding to nucleotides 385-948 of NCBI Reference Sequence NM_003212.3. The signal sequence is underlined.

(SEQ ID NO: 515)

ATGGACTGCAGGAAGATGGCCCGCTTCTCTTACAGTGTGATTTGGATCAT
GGCCATTTCTAAAGTCTTTGAACTGGGATTAGTTGCCGGGCTGGGCCATC
AGGAATTTGCTCGTCCATCTCGGGGATACCTGGCCTTCAGAGATGACAGC
ATTTGGCCCCAGGAGGAGCCTGCAATTCGGCCTCGGTCTTCCCAGCGTGT
GCCGCCCATGGGGATACAGCACAGTAAGGAGCTAAACAGAACCTGCTGCC
TGAATGGGGGAACCTGCATGCTGGGGTCCTTTTGTGCCTGCCCTCCCTCC
TTCTACGGACGGAACTGTGAGCACGATGTGCGCAAAGAGAACTGTGGGTC
TGTGCCCCATGACACCTGGCTGCCCAAGAAGTGTTCCCTGTGTAAATGCT
GGCACGGTCAGCTCCGCTGCTTTCCTCAGGCATTTCTACCCGGCTGTGAT
GGCCTTGTGATGGATGAGCACCTCGTGGCTTCCAGGACTCCAGAACTACC
ACCGTCTGCACGTACTACCACTTTTATGCTAGTTGGCATCTGCCTTTCTA
TACAAAGCTACTAT

[0481] A nucleic acid sequence encoding a processed Cripto-1 isoform 1 is shown below (SEQ ID NO: 516):

(SEQ ID NO: 516)

CTGGGCCATCAGGAATTTGCTCGTCCATCTCGGGGATACCTGGCCTTCAG
AGATGACAGCATTTGGCCCCAGGAGGAGCCTGCAATTCGGCCTCGGTCTT
CCCAGCGTGTGCCGCCCATGGGGATACAGCACAGTAAGGAGCTAAACAGA
ACCTGCTGCCTGAATGGGGGAACCTGCATGCTGGGGTCCTTTTGTGCCTG
CCCTCCCTCCTTCTACGGACGGAACTGTGAGCACGATGTGCGCAAAGAGA
ACTGTGGGTCTGTGCCCCATGACACCTGGCTGCCCAAGAAGTGTTCCCTG
TGTAAATGCTGGCACGGTCAGCTCCGCTGCTTTCCTCAGGCATTTCTACC
CGGCTGTGATGGCCTTGTGATGGATGAGCACCTCGTGGCTTCC

[0482] The human Cripto-1 isoform 2 protein sequence (NCBI Ref Seq NP_001167607.1) is as follows:

| (SEQ ID NO: 517) | |
|---|---|
| 1 | MAISKVFELG LVAGLGHQEF ARPSRGYLAF RDDSIWPQEE PAIRPRSSQR VPPMGIQHSK |
| 61 | ELNRTCCLNG GTCMLGSFCA CPPSFYGRNC EHDVRKENCG SVPHDTWLPK KCSLCKCWHG |
| 121 | QLRCFPQAFL PGCDGLVMDE HLVASRTPEL PPSARTTTFM LVGICLSIQS YY |

[0483] A mature Cripto-1 polypeptide sequence (isoform 2) is as follows:

(SEQ ID NO: 518)

MAISKVFELGLVAGLGHQEFARPSRGYLAFRDDSIWPQEEPAIRPRSSQR
VPPMGIQHSKELNRTCCLNGGTCMLGSFCACPPSFYGRNCEHDVRKENCG
SVPHDTWLPKKCSLCKCWHGQLRCFPQAFLPGCDGLVMDEHLVAS

[0484] A nucleic acid sequence encoding unprocessed human Cripto-1 isoform 2 precursor protein is shown below (SEQ ID NO: 519), corresponding to nucleotides 43-558 of NCBI Reference Sequence NM_001174136.1.

(SEQ ID NO: 519)

ATGGCCATTTCTAAAGTCTTTGAACTGGGATTAGTTGCCGGGCTGGGCCA
TCAGGAATTTGCTCGTCCATCTCGGGGATACCTGGCCTTCAGAGATGACA
GCATTTGGCCCCAGGAGGAGCCTGCAATTCGGCCTCGGTCTTCCCAGCGT
GTGCCGCCCATGGGGATACAGCACAGTAAGGAGCTAAACAGAACCTGCTG
CCTGAATGGGGGAACCTGCATGCTGGGGTCCTTTTGTGCCTGCCCTCCCT
CCTTCTACGGACGGAACTGTGAGCACGATGTGCGCAAAGAGAACTGTGGG
TCTGTGCCCCATGACACCTGGCTGCCCAAGAAGTGTTCCCTGTGTAAATG
CTGGCACGGTCAGCTCCGCTGCTTTCCTCAGGCATTTCTACCCGGCTGTG
ATGGCCTTGTGATGGATGAGCACCTCGTGGCTTCCAGGACTCCAGAACTA
CCACCGTCTGCACGTACTACCACTTTTATGCTAGTTGGCATCTGCCTTTC
TATACAAAGCTACTAT

[0485] A nucleic acid sequence encoding a processed human Cripto-1 isoform 2 is shown below (SEQ ID NO: 520):

(SEQ ID NO: 520)

ATGGCCATTTCTAAAGTCTTTGAACTGGGATTAGTTGCCGGGCTGGGCCA
TCAGGAATTTGCTCGTCCATCTCGGGGATACCTGGCCTTCAGAGATGACA
GCATTTGGCCCCAGGAGGAGCCTGCAATTCGGCCTCGGTCTTCCCAGCGT
GTGCCGCCCATGGGGATACAGCACAGTAAGGAGCTAAACAGAACCTGCTG
CCTGAATGGGGGAACCTGCATGCTGGGGTCCTTTTGTGCCTGCCCTCCCT
CCTTCTACGGACGGAACTGTGAGCACGATGTGCGCAAAGAGAACTGTGGG
TCTGTGCCCCATGACACCTGGCTGCCCAAGAAGTGTTCCCTGTGTAAATG
CTGGCACGGTCAGCTCCGCTGCTTTCCTCAGGCATTTCTACCCGGCTGTG
ATGGCCTTGTGATGGATGAGCACCTCGTGGCTTCC

[0486] In certain embodiments, the disclosure relates to heteromultimers that comprise at least one Cripto-1 polypeptide, which includes fragments, functional variants, and modified forms thereof. Preferably, Cripto-1 polypeptides for use in accordance with the disclosure (e.g., heteromultimers comprising a Cripto-1 polypeptide and uses thereof) are soluble (e.g., an extracellular domain of Cripto-1). In other preferred embodiments, Cripto-1 polypeptides for use in accordance with the disclosure bind to and/or inhibit (antagonize) activity (e.g., Smad signaling) of one or more TGF-beta superfamily ligands. In some embodiments, heteromultimers of the disclosure comprise at least one Cripto-1 polypeptide that is at least 70%, 75%, 80%, 85%, 90%, 91%, 92%, 93%, 94%, 95%, 96%, 97%, 98%, 99%, or 100% identical to the amino acid sequence of SEQ ID NOs: 513, 514, 517, or 518. In some embodiments, heteromultimers of the disclosure comprise at least one Cripto-1 polypeptide that is at least 70%, 75%, 80%, 85%, 90%, 91%, 92%, 93%, 94%, 95%, 96%, 97%, 98%, 99%, or 100% identical to a polypeptide that begins at any one of amino acids of 31-82 (e.g., amino acid residues 31, 32, 33, 34, 35, 36, 37, 38, 39, 40, 41, 42, 43, 44, 45, 46, 47, 48, 49, 50, 51, 52, 53, 54, 55, 56, 57, 58, 59, 60, 61, 62, 63, 64, 65, 66, 67, 68, 69, 70, 71, 72, 73, 74, 75, 76, 77, 78, 79, 80, 81, or 82) of SEQ ID NO: 513, and ends at any one of amino acids 172-188 (e.g., amino acid residues 172, 173, 174, 175, 176, 177, 178, 179, 180, 181, 182, 183, 184, 185, 186, 187, or 188) of SEQ ID NO: 513. In some embodiments, heteromultimers of the disclosure comprise at least one Cripto-1 polypeptide that is at least 70%, 75%, 80%, 85%, 90%, 91%, 92%, 93%, 94%, 95%, 96%, 97%, 98%, 99%, or 100% identical to amino acids of 31-188 of SEQ ID NO: 513. In some embodiments, heteromultimers of the disclosure comprise at least one Cripto-1 polypeptide that is at least 70%, 75%, 80%, 85%, 90%, 91%, 92%, 93%, 94%, 95%, 96%, 97%, 98%, 99%, or 100% identical to amino acids of 63-172 of SEQ ID NO: 513. In some embodiments, heteromultimers of the disclosure comprise at least one Cripto-1 polypeptide that is at least 70%, 75%, 80%, 85%, 90%, 91%, 92%, 93%, 94%, 95%, 96%, 97%, 98%, 99%, or 100% identical to amino acids of 82-172 of SEQ ID NO: 513. In some embodiments, heteromultimers of the disclosure comprise at least one Cripto-1 polypeptide that is at least 70%, 75%, 80%, 85%, 90%, 91%, 92%, 93%, 94%, 95%, 96%, 97%, 98%, 99%, or 100% identical to amino acids of 82-188 of SEQ ID NO: 513. In some embodiments, heteromultimers of the disclosure comprise at least one Cripto-1 polypeptide that is at least 70%, 75%, 80%, 85%, 90%, 91%, 92%, 93%, 94%, 95%, 96%, 97%, 98%, 99%, or 100% identical to amino acids of 31-172 of SEQ ID NO: 513. In some embodiments, heteromultimers of the disclosure comprise at least one Cripto-1 polypeptide that is at least 70%, 75%, 80%, 85%, 90%, 91%, 92%, 93%, 94%, 95%, 96%, 97%, 98%, 99%, or 100% identical to amino acids of 63-188 of SEQ ID NO: 513. In some embodiments, heteromultimers of the disclosure comprise at least one Cripto-1 polypeptide that is at least 70%, 75%, 80%, 85%, 90%, 91%, 92%, 93%, 94%, 95%, 96%, 97%, 98%, 99%, or 100% identical to a polypeptide that begins at any one of amino acids of 15-66 (e.g., amino acid residues 15, 16, 17, 18, 19, 20, 21, 22, 23, 24, 25, 26, 27, 28, 29, 30, 31, 32, 33, 34, 35, 36, 37, 38, 39, 40, 41, 42, 43, 44, 45, 46, 47, 48, 49, 50, 51, 52, 53, 54, 55, 56, 57, 58, 59, 60, 61, 62, 63, 64, 65, or 66) of SEQ ID NO: 517, and ends at any one of amino acids 156-172 (e.g., amino acid residues 156, 157, 158, 159, 160, 161, 162, 163, 164, 165, 166, 167, 168, 169, 170, 171, or 172) of SEQ ID NO: 517. In some embodiments, heteromultimers of the disclosure comprise at least one Cripto-1 polypeptide that is at least 70%, 75%, 80%, 85%, 90%, 91%, 92%, 93%, 94%, 95%, 96%, 97%, 98%, 99%, or 100% identical to amino acids of 15-172 of SEQ ID NO: 517. In some embodiments, heteromultimers of the disclosure comprise at least one Cripto-1 polypeptide that is at least 70%, 75%, 80%, 85%, 90%, 91%, 92%, 93%, 94%, 95%, 96%, 97%, 98%, 99%, or 100% identical to amino acids of 47-172 of SEQ ID NO: 517. In some embodiments, heteromultimers of the disclosure comprise at least one Cripto-1 polypeptide that is at least 70%, 75%, 80%, 85%, 90%, 91%, 92%, 93%, 94%, 95%, 96%, 97%, 98%, 99%, or 100% identical to amino acids of 47-156 of SEQ ID NO: 517. In some embodiments, heteromultimers of the disclosure comprise at least one Cripto-1 polypeptide that is at least 70%, 75%, 80%, 85%, 90%, 91%, 92%, 93%, 94%, 95%, 96%, 97%, 98%, 99%, or 100% identical to amino acids of 66-165 of SEQ ID NO: 517. In some embodiments, heteromultimers of the disclosure comprise at least one Cripto-1 polypeptide that is at least 70%, 75%, 80%, 85%, 90%, 91%, 92%, 93%, 94%, 95%, 96%, 97%, 98%, 99%, or 100% identical to amino acids of 15-156 of SEQ ID NO: 517. In some embodiments, heteromultimers of the disclosure comprise at least one Cripto-1 polypeptide that is at least 70%, 75%, 80%, 85%, 90%, 91%, 92%, 93%, 94%, 95%, 96%, 97%, 98%, 99%, or 100% identical to amino acids of 66-172 of SEQ ID NO: 517. In some embodiments, heteromultimers of the disclosure comprise at least one Cripto-1 polypeptide that is at least 70%, 75%, 80%, 85%, 90%, 91%, 92%, 93%, 94%, 95%, 96%, 97%, 98%, 99%, or 100% identical to a polypeptide that begins at any one of amino acids of 31-82 (e.g., amino acid residues 31, 32, 33, 34, 35, 36, 37, 38, 39, 40, 41, 42, 43, 44, 45, 46, 47, 48, 49, 50, 51, 52, 53, 54, 55, 56, 57, 58, 59, 60, 61, 62, 63, 64, 65, 66, 67, 68, 69, 70, 71, 72, 73, 74, 75, 76, 77, 78, 79, 80, 81, or 82) of SEQ ID NO: 513, and ends at any one of amino acids 181-188 (e.g., amino acid residues 181, 182, 183, 184, 185, 185, 187, or 188) of SEQ ID NO: 513. In some embodiments, heteromultimers of the disclosure comprise at least one Cripto-1 polypeptide that is at least 70%, 75%, 80%, 85%, 90%, 91%, 92%, 93%, 94%, 95%, 96%, 97%, 98%, 99%, or 100% identical to amino acids of 31-188 of SEQ ID NO: 513. In some embodiments, heteromultimers of the disclosure comprise at least one Cripto-1 polypeptide that is at least 70%, 75%, 80%, 85%, 90%, 91%, 92%, 93%, 94%, 95%, 96%, 97%, 98%, 99%, or 100% identical to amino acids of 82-181 of SEQ ID NO: 513. In some embodiments, heteromultimers of the disclosure comprise at least one Cripto-1 polypeptide that is at least 70%, 75%, 80%, 85%, 90%, 91%, 92%, 93%, 94%, 95%, 96%, 97%, 98%, 99%, or 100% identical to a polypeptide that begins at any one of amino acids of 1-66 (e.g., amino acid residues 1, 2, 3, 4, 5, 6, 7, 8, 9, 10, 11, 12, 13, 14, 15, 16, 17, 18, 19, 20, 21, 22, 23, 24, 25, 26, 27, 28, 29, 30, 31, 32, 33, 34, 35, 36, 37, 38, 39, 40, 41, 42, 43, 44, 45, 46, 47, 48, 49, 50, 51, 52, 53, 54, 55, 56, 57, 58, 59, 60, 61, 62, 63, 64, 65, or 66) of SEQ ID NO: 517, and ends at any one of amino acids 165-172 (e.g., amino acid residues 165, 166, 167, 168, 169, 170, 171, or 172) of SEQ ID NO: 517. In some embodiments, heteromultimers of the disclosure comprise at least one Cripto-1 polypeptide that is at least 70%, 75%, 80%, 85%, 90%, 91%, 92%, 93%, 94%, 95%, 96%, 97%, 98%, 99%, or 100% identical to amino acids of 1-172 of SEQ ID NO: 517. In some embodiments, heteromultimers of the disclosure comprise at least one Cripto-1 polypeptide that is at least 70%, 75%, 80%, 85%, 90%, 91%, 92%, 93%, 94%, 95%, 96%, 97%, 98%, 99%, or 100% identical to amino acids of 66-165 of SEQ ID NO: 517. In some embodiments, heteromultimers of the disclosure comprise at least one Cripto-1 polypeptide that is at least 70%, 75%, 80%, 85%, 90%, 91%, 92%, 93%, 94%, 95%, 96%, 97%, 98%, 99%, or 100% identical to amino acids of 31-61 of SEQ ID NO: 513. In some embodiments, heteromultimers of the disclosure comprise at least one Cripto-1 polypeptide that is at least 70%, 75%, 80%, 85%, 90%, 91%, 92%, 93%, 94%, 95%, 96%, 97%, 98%, 99%, or 100% identical to amino acids of 63-161 of SEQ ID NO: 513. In some embodiments, heteromultimers of the disclosure comprise at least one Cripto-1 polypeptide that is at least 70%, 75%, 80%, 85%, 90%, 91%, 92%, 93%, 94%, 95%, 96%, 97%, 98%, 99%, or 100% identical to amino acids of 1-145 of SEQ ID NO: 517.

[0487] The term “Cryptic polypeptide” includes polypeptides comprising any naturally occurring Cryptic protein (encoded by CFC1 or one of its nonhuman orthologs) as well as any variants thereof (including mutants, fragments, fusions, and peptidomimetic forms) that retain a useful activity.

[0488] The human Cryptic isoform 1 precursor protein sequence (NCBI Ref Seq NP_115934.1) is as follows:

| (SEQ ID NO: 521) | |
|---|---|
| 1 | MTWRHHVRLL FTVSLALQII NLGNSYQREK HNGGREEVTK VATQKHRQSP LNWTSSHFGE |
| 61 | VTGSAEGWGP EEPLPYSRAF GEGASARPRC CRNGGTCVLG SFCVCPAHFT GRYCEHDQRR |
| 121 | SECGALEHGA WTLRACHLCR CIFGALHCLP LQTPDRCDPK DFLASHAHGP SAGGAPSLLL |
| 181 | LLPCALLHRL LRPDAPAHPR SLVPSVLQRE RRPCGRPGLG HRL |

[0489] The signal peptide is indicated by single underline.

[0490] A processed Cryptic isoform 1 polypeptide sequence is as follows:

(SEQ ID NO: 522)

YQREKHNGGREEVTKVATQKHRQSPLNWTSSHFGEVTGSAEGWGPEEPLP
YSRAFGEGASARPRCCRNGGTCVLGSFCVCPAHFTGRYCEHDQRRSECGA
LEHGAWTLRACHLCRCIFGALHCLPLQTPDRCDPKDFLASHAHG

[0491] A nucleic acid sequence encoding unprocessed human Cryptic isoform 1 precursor protein is shown below (SEQ ID NO: 523), corresponding to nucleotides 289-957 of NCBI Reference Sequence NM_032545.3. The signal sequence is underlined.

(SEQ ID NO: 523)

ATGACCTGGAGGCACCATGTCAGGCTTCTGTTTACGGTCAGTTTGGCATT
ACAGATCATCAATTTGGGAAACAGCTATCAAAGAGAGAAACATAACGGCG
GTAGAGAGGAAGTCACCAAGGTTGCCACTCAGAAGCACCGACAGTCACCG
CTCAACTGGACCTCCAGTCATTTCGGAGAGGTGACTGGGAGCGCCGAGGG
CTGGGGGCCGGAGGAGCCGCTCCCCTACTCCCGGGCTTTCGGAGAGGGTG
CGTCCGCGCGGCCGCGCTGCTGCAGGAACGGCGGTACCTGCGTGCTGGGC
AGCTTCTGCGTGTGCCCGGCCCACTTCACCGGCCGCTACTGCGAGCATGA
CCAGAGGCGCAGTGAATGCGGCGCCCTGGAGCACGGAGCCTGGACCCTCC
GCGCCTGCCACCTCTGCAGGTGCATCTTCGGGGCCCTGCACTGCCTCCCC
CTCCAGACGCCTGACCGCTGTGACCCGAAAGACTTCCTGGCCTCCCACGC
TCACGGGCCGAGCGCCGGGGGCGCGCCCAGCCTGCTACTCTTGCTGCCCT
GCGCACTCCTGCACCGCCTCCTGCGCCCGGATGCGCCCGCGCACCCTCGG
TCCCTGGTCCCTTCCGTCCTCCAGCGGGAGCGGCGCCCCTGCGGAAGGCC
GGGACTTGGGCATCGCCTT

[0492] A nucleic acid sequence encoding a processed human Cryptic isoform 1 is shown below (SEQ ID NO: 524):

(SEQ ID NO: 524)

TATCAAAGAGAGAAACATAACGGCGGTAGAGAGGAAGTCACCAAGGTTGC
CACTCAGAAGCACCGACAGTCACCGCTCAACTGGACCTCCAGTCATTTCG
GAGAGGTGACTGGGAGCGCCGAGGGCTGGGGGCCGGAGGAGCCGCTCCCC
TACTCCCGGGCTTTCGGAGAGGGTGCGTCCGCGCGGCCGCGCTGCTGCAG
GAACGGCGGTACCTGCGTGCTGGGCAGCTTCTGCGTGTGCCCGGCCCACT
TCACCGGCCGCTACTGCGAGCATGACCAGAGGCGCAGTGAATGCGGCGCC
CTGGAGCACGGAGCCTGGACCCTCCGCGCCTGCCACCTCTGCAGGTGCAT
CTTCGGGGCCCTGCACTGCCTCCCCCTCCAGACGCCTGACCGCTGTGACC
CGAAAGACTTCCTGGCCTCCCACGCTCACGGG

[0493] The human Cryptic isoform 2 precursor protein sequence (NCBI Ref Seq NP_001257349.1) is as follows:

| (SEQ ID NO: 525) | |
|---|---|
| 1 | MTWRHHVRLL FTVSLALQII NLGNSYQREK HNGGREEVTK VATQKHRQSP LNWTSSHFGE |
| 61 | VTGSAEGWGP EEPLPYSRAF GEVNAAPWST EPGPSAPATS AGASSGPCTA SPSRRLTAVT |
| 121 | RKTSWPPTLT GRAPGARPAC YSCCPAHSCT ASCARMRPRT LGPWSLPSSS GSGAPAEGRD |
| 181 | LGIAFNFLCC K |

[0494] The signal peptide is indicated by single underline.

[0495] A processed Cryptic isoform 2 polypeptide sequence is as follows:

(SEQ ID NO: 526)

YQREKHNGGREEVTKVATQKHRQSPLNWTSSHFGEVTGSAEGWGPEEPLP
YSRAFGEVNAAPWSTEPGPSAPATSAGASSGPCTASPSRRLTAVTRKTSW
PPTLTGRAPGARPACYSCCPAHSCTASCARMRPRTLGPWSLPSSSGSGAP
AEGRDLGIAFNFLCCK

[0496] A nucleic acid sequence encoding unprocessed human Cryptic isoform 2 precursor protein is shown below (SEQ ID NO: 527), corresponding to nucleotides 289-861 of NCBI Reference Sequence NM_001270420.1. The signal sequence is underlined.

(SEQ ID NO: 527)

ATGACCTGGAGGCACCATGTCAGGCTTCTGTTTACGGTCAGTTTGGCATT
ACAGATCATCAATTTGGGAAACAGCTATCAAAGAGAGAAACATAACGGCG
GTAGAGAGGAAGTCACCAAGGTTGCCACTCAGAAGCACCGACAGTCACCG
CTCAACTGGACCTCCAGTCATTTCGGAGAGGTGACTGGGAGCGCCGAGGG
CTGGGGGCCGGAGGAGCCGCTCCCCTACTCCCGGGCTTTCGGAGAGGTGA
ATGCGGCGCCCTGGAGCACGGAGCCTGGACCCTCCGCGCCTGCCACCTCT
GCAGGTGCATCTTCGGGGCCCTGCACTGCCTCCCCCTCCAGACGCCTGAC
CGCTGTGACCCGAAAGACTTCCTGGCCTCCCACGCTCACGGGCCGAGCGC
CGGGGGCGCGCCCAGCCTGCTACTCTTGCTGCCCTGCGCACTCCTGCACC
GCCTCCTGCGCCCGGATGCGCCCGCGCACCCTCGGTCCCTGGTCCCTTCC
GTCCTCCAGCGGGAGCGGCGCCCCTGCGGAAGGCCGGGACTTGGGCATCG
CCTTTAATTTTCTATGTTGTAAA

[0497] A nucleic acid sequence encoding processed Cryptic isoform 2 is shown below (SEQ ID NO: 528):

(SEQ ID NO: 528)

TATCAAAGAGAGAAACATAACGGCGGTAGAGAGGAAGTCACCAAGGTTGC
CACTCAGAAGCACCGACAGTCACCGCTCAACTGGACCTCCAGTCATTTCG
GAGAGGTGACTGGGAGCGCCGAGGGCTGGGGGCCGGAGGAGCCGCTCCCC
TACTCCCGGGCTTTCGGAGAGGTGAATGCGGCGCCCTGGAGCACGGAGCC
TGGACCCTCCGCGCCTGCCACCTCTGCAGGTGCATCTTCGGGGCCCTGCA
CTGCCTCCCCCTCCAGACGCCTGACCGCTGTGACCCGAAAGACTTCCTGG
CCTCCCACGCTCACGGGCCGAGCGCCGGGGGCGCGCCCAGCCTGCTACTC
TTGCTGCCCTGCGCACTCCTGCACCGCCTCCTGCGCCCGGATGCGCCCGC
GCACCCTCGGTCCCTGGTCCCTTCCGTCCTCCAGCGGGAGCGGCGCCCCT
GCGGAAGGCCGGGACTTGGGCATCGCCTTTAATTTTCTATGTTGTAAA

[0498] The human Cryptic isoform 3 precursor protein sequence (NCBI Ref Seq NP_001257350.1) is as follows:

| (SEQ ID NO: 529) | |
|---|---|
| 1 | MTWRHHVRLL FTVSLALQII NLGNSYQREK HNGGREEVTK VATQKHRQSP LNWTSSHFGE |
| 61 | VTGSAEGWGP EEPLPYSRAF GEDPKDFLAS HAHGPSAGGA PSLLLLLPCA LLHRLLRPDA |
| 121 | PAHPRSLVPS VLQRERRPCG RPGLGHRL |

[0499] The signal peptide is indicated by single underline.

[0500] A processed Cryptic isoform 3 polypeptide sequence is as follows:

(SEQ ID NO: 530)

YQREKHNGGREEVTKVATQKHRQSPLNWTSSHFGEVTGSAEGWGPEEPLP
YSRAFGEDPKDFLASHAHG

[0501] A nucleic acid sequence encoding unprocessed human Cryptic isoform 3 precursor protein is shown below (SEQ ID NO: 531), corresponding to nucleotides 289-732 of NCBI Reference Sequence NM_001270421.1. The signal sequence is underlined.

(SEQ ID NO: 531)

ATGACCTGGAGGCACCATGTCAGGCTTCTGTTTACGGTCAGTTTGGCATT
ACAGATCATCAATTTGGGAAACAGCTATCAAAGAGAGAAACATAACGGCG
GTAGAGAGGAAGTCACCAAGGTTGCCACTCAGAAGCACCGACAGTCACCG
CTCAACTGGACCTCCAGTCATTTCGGAGAGGTGACTGGGAGCGCCGAGGG
CTGGGGGCCGGAGGAGCCGCTCCCCTACTCCCGGGCTTTCGGAGAGGACC
CGAAAGACTTCCTGGCCTCCCACGCTCACGGGCCGAGCGCCGGGGGCGCG
CCCAGCCTGCTACTCTTGCTGCCCTGCGCACTCCTGCACCGCCTCCTGCG
CCCGGATGCGCCCGCGCACCCTCGGTCCCTGGTCCCTTCCGTCCTCCAGC
GGGAGCGGCGCCCCTGCGGAAGGCCGGGACTTGGGCATCGCCTT

[0502] A nucleic acid sequence encoding a processed Cryptic isoform 3 is shown below (SEQ ID NO: 532):

(SEQ ID NO: 532)

TATCAAAGAGAGAAACATAACGGCGGTAGAGAGGAAGTCACCAAGGTTGC
CACTCAGAAGCACCGACAGTCACCGCTCAACTGGACCTCCAGTCATTTCG
GAGAGGTGACTGGGAGCGCCGAGGGCTGGGGGCCGGAGGAGCCGCTCCCC
TACTCCCGGGCTTTCGGAGAGGACCCGAAAGACTTCCTGGCCTCCCACGC
TCACGGG

[0503] In certain embodiments, the disclosure relates to heteromultimers that comprise at least one Cryptic polypeptide, which includes fragments, functional variants, and modified forms thereof. Preferably, Cryptic polypeptides for use in accordance with the disclosure (e.g., heteromultimers comprising a Cryptic polypeptide and uses thereof) are soluble (e.g., an extracellular domain of Cryptic). In other preferred embodiments, Cryptic polypeptides for use in accordance with the disclosure bind to and/or inhibit (antagonize) activity (e.g., Smad signaling) of one or more TGF-beta superfamily ligands. In some embodiments, heteromultimers of the disclosure comprise at least one Cryptic polypeptide that is at least 70%, 75%, 80%, 85%, 90%, 91%, 92%, 93%, 94%, 95%, 96%, 97%, 98%, 99%, or 100% identical to the amino acid sequence of SEQ ID NOs: 521, 522, 525, 526, 529, or 530. In some embodiments, heteromultimers of the disclosure comprise at least one Cryptic polypeptide that is at least 70%, 75%, 80%, 85%, 90%, 91%, 92%, 93%, 94%, 95%, 96%, 97%, 98%, 99%, or 100% identical to a polypeptide that begins at any one of amino acids of 26-90 (e.g., amino acid residues 26, 27, 28, 29, 30, 31, 32, 33, 34, 35, 36, 37, 38, 39, 40, 41, 42, 43, 44, 45, 46, 47, 48, 49, 50, 51, 52, 53, 54, 55, 56, 57, 58, 59, 60, 61, 62, 63, 64, 65, 66, 67, 68, 69, 70, 71, 72, 73, 74, 75, 76, 77, 78, 79, 80, 81, 82, 83, 84, 85, 86, 87, 88, 89, or 90) of SEQ ID NO: 521, and ends at any one of amino acids 157-223 (e.g., amino acid residues 157, 158, 159, 160, 161, 162, 163, 164, 165, 166, 167, 168, 169, 170, 171, 172, 173, 174, 175, 178, 179, 180, 181, 182, 183, 184, 185, 186, 187, 188, 189, 190, 191, 192, 193, 194, 195, 196, 197, 198, 199, 200, 201, 202, 203, 204, 205, 206, 207, 208, 209, 210, 211, 212, 213, 214, 215, 126, 217, 218, 219, 220, 221, 222, or 223) of SEQ ID NO: 521. In some embodiments, heteromultimers of the disclosure comprise at least one Cryptic polypeptide that is at least 70%, 75%, 80%, 85%, 90%, 91%, 92%, 93%, 94%, 95%, 96%, 97%, 98%, 99%, or 100% identical to amino acids of 26-223 of SEQ ID NO: 521. In some embodiments, heteromultimers of the disclosure comprise at least one Cryptic polypeptide that is at least 70%, 75%, 80%, 85%, 90%, 91%, 92%, 93%, 94%, 95%, 96%, 97%, 98%, 99%, or 100% identical to amino acids of 26-157 of SEQ ID NO: 521. In some embodiments, heteromultimers of the disclosure comprise at least one Cryptic polypeptide that is at least 70%, 75%, 80%, 85%, 90%, 91%, 92%, 93%, 94%, 95%, 96%, 97%, 98%, 99%, or 100% identical to amino acids of 90-157 of SEQ ID NO: 521. In some embodiments, heteromultimers of the disclosure comprise at least one Cryptic polypeptide that is at least 70%, 75%, 80%, 85%, 90%, 91%, 92%, 93%, 94%, 95%, 96%, 97%, 98%, 99%, or 100% identical to amino acids of 26-169 of SEQ ID NO: 521. In some embodiments, heteromultimers of the disclosure comprise at least one Cryptic polypeptide that is at least 70%, 75%, 80%, 85%, 90%, 91%, 92%, 93%, 94%, 95%, 96%, 97%, 98%, 99%, or 100% identical to amino acids of 90-169 of SEQ ID NO: 521. In some embodiments, heteromultimers of the disclosure comprise at least one Cryptic polypeptide that is at least 70%, 75%, 80%, 85%, 90%, 91%, 92%, 93%, 94%, 95%, 96%, 97%, 98%, 99%, or 100% identical to amino acids of 90-223 of SEQ ID NO: 521. In some embodiments, heteromultimers of the disclosure comprise at least one Cryptic polypeptide that is at least 70%, 75%, 80%, 85%, 90%, 91%, 92%, 93%, 94%, 95%, 96%, 97%, 98%, 99%, or 100% identical to amino acids of 26-82 of SEQ ID NO: 521. In some embodiments, heteromultimers of the disclosure comprise at least one Cryptic polypeptide that is at least 70%, 75%, 80%, 85%, 90%, 91%, 92%, 93%, 94%, 95%, 96%, 97%, 98%, 99%, or 100% identical to a polypeptide that begins at any one of amino acids of 26-30 (e.g., amino acid residues 26, 27, 28, 29, or 30) of SEQ ID NO: 525, and ends at any one of amino acids 82-191 (e.g., amino acid residues 82, 83, 84, 85, 86, 57, 88, 89, 90, 91, 92, 93, 94, 95, 96, 97, 98, 99, 100, 101, 102, 103, 104, 105, 106, 107, 108, 109, 110, 111, 112, 113, 114, 115, 116, 117, 118, 119, 120, 121, 122, 123, 124, 125, 126, 127, 128, 129, 130, 131, 132, 133, 134, 135, 136, 137, 138, 139, 140, 141, 142, 143, 144, 145, 146, 147, 148, 149, 150, 151, 152, 153, 154, 155, 156, 157, 158, 159, 160, 161, 162, 163, 164, 165, 166, 167, 168, 169, 170, 171, 172, 173, 174, 175, 178, 179, 180, 181, 182, 183, 184, 185, 186, 187, 188, 189, 190, or 191) of SEQ ID NO: 525. In some embodiments, heteromultimers of the disclosure comprise at least one Cryptic polypeptide that is at least 70%, 75%, 80%, 85%, 90%, 91%, 92%, 93%, 94%, 95%, 96%, 97%, 98%, 99%, or 100% identical to amino acids of 26-82 of SEQ ID NO: 525. In some embodiments, heteromultimers of the disclosure comprise at least one Cryptic polypeptide that is at least 70%, 75%, 80%, 85%, 90%, 91%, 92%, 93%, 94%, 95%, 96%, 97%, 98%, 99%, or 100% identical to amino acids of 26-191 of SEQ ID NO: 525. In some embodiments, heteromultimers of the disclosure comprise at least one Cryptic polypeptide that is at least 70%, 75%, 80%, 85%, 90%, 91%, 92%, 93%, 94%, 95%, 96%, 97%, 98%, 99%, or 100% identical to amino acids of 30-82 of SEQ ID NO: 525. In some embodiments, heteromultimers of the disclosure comprise at least one Cryptic polypeptide that is at least 70%, 75%, 80%, 85%, 90%, 91%, 92%, 93%, 94%, 95%, 96%, 97%, 98%, 99%, or 100% identical to amino acids of 30-191 of SEQ ID NO: 525. In some embodiments, heteromultimers of the disclosure comprise at least one Cryptic polypeptide that is at least 70%, 75%, 80%, 85%, 90%, 91%, 92%, 93%, 94%, 95%, 96%, 97%, 98%, 99%, or 100% identical to a polypeptide that begins at any one of amino acids of 26-30 (e.g., amino acid residues 26, 27, 28, 29, or 30) of SEQ ID NO: 529, and ends at any one of amino acids 82-148 (e.g., amino acid residues 82, 83, 84, 85, 86, 57, 88, 89, 90, 91, 92, 93, 94, 95, 96, 97, 98, 99, 100, 101, 102, 103, 104, 105, 106, 107, 108, 109, 110, 111, 112, 113, 114, 115, 116, 117, 118, 119, 120, 121, 122, 123, 124, 125, 126, 127, 128, 129, 130, 131, 132, 133, 134, 135, 136, 137, 138, 139, 140, 141, 142, 143, 144, 145, 146, 147, or 148) of SEQ ID NO: 529. In some embodiments, heteromultimers of the disclosure comprise at least one Cryptic polypeptide that is at least 70%, 75%, 80%, 85%, 90%, 91%, 92%, 93%, 94%, 95%, 96%, 97%, 98%, 99%, or 100% identical to amino acids of 26-148 of SEQ ID NO: 529. In some embodiments, heteromultimers of the disclosure comprise at least one Cryptic polypeptide that is at least 70%, 75%, 80%, 85%, 90%, 91%, 92%, 93%, 94%, 95%, 96%, 97%, 98%, 99%, or 100% identical to amino acids of 26-82 of SEQ ID NO: 529. In some embodiments, heteromultimers of the disclosure comprise at least one Cryptic polypeptide that is at least 70%, 75%, 80%, 85%, 90%, 91%, 92%, 93%, 94%, 95%, 96%, 97%, 98%, 99%, or 100% identical to amino acids of 30-148 of SEQ ID NO: 529. In some embodiments, heteromultimers of the disclosure comprise at least one Cryptic polypeptide that is at least 70%, 75%, 80%, 85%, 90%, 91%, 92%, 93%, 94%, 95%, 96%, 97%, 98%, 99%, or 100% identical to amino acids of 30-82 of SEQ ID NO: 529. In some embodiments, heteromultimers of the disclosure comprise at least one Cryptic polypeptide that is at least 70%, 75%, 80%, 85%, 90%, 91%, 92%, 93%, 94%, 95%, 96%, 97%, 98%, 99%, or 100% identical to a polypeptide that begins at any one of amino acids of 26-90 (e.g., amino acid residues 26, 27, 28, 29, 30, 31, 32, 33, 34, 35, 36, 37, 38, 39, 40, 41, 42, 43, 44, 45, 46, 47, 48, 49, 50, 51, 52, 53, 54, 55, 56, 57, 58, 59, 60, 61, 62, 63, 64, 65, 66, 67, 68, 69, 70, 71, 72, 73, 74, 75, 76, 77, 78, 79, 80, 81, 82, 83, 84, 85, 86, 87, 88, 89, or 90) of SEQ ID NO: 521, and ends at any one of amino acids 214-223 (e.g., amino acid residues 214, 215, 126, 217, 218, 219, 220, 221, 222, or 223) of SEQ ID NO: 521. In some embodiments, heteromultimers of the disclosure comprise at least one Cryptic polypeptide that is at least 70%, 75%, 80%, 85%, 90%, 91%, 92%, 93%, 94%, 95%, 96%, 97%, 98%, 99%, or 100% identical to amino acids of 26-223 of SEQ ID NO: 521. In some embodiments, heteromultimers of the disclosure comprise at least one Cryptic polypeptide that is at least 70%, 75%, 80%, 85%, 90%, 91%, 92%, 93%, 94%, 95%, 96%, 97%, 98%, 99%, or 100% identical to amino acids of 109-223 of SEQ ID NO: 521. In some embodiments, heteromultimers of the disclosure comprise at least one Cryptic polypeptide that is at least 70%, 75%, 80%, 85%, 90%, 91%, 92%, 93%, 94%, 95%, 96%, 97%, 98%, 99%, or 100% identical to a polypeptide that begins at any one of amino acids of 26-108 (e.g., amino acid residues 26, 27, 28, 29, 30, 31, 32, 33, 34, 35, 36, 37, 38, 39, 40, 41, 42, 43, 44, 45, 46, 47, 48, 49, 50, 51, 52, 53, 54, 55, 56, 57, 58, 59, 60, 61, 62, 63, 64, 65, 66, 67, 68, 69, 70, 71, 72, 73, 74, 75, 76, 77, 78, 79, 80, 81, 82, 83, 84, 85, 86, 87, 88, 89, 90, 91, 92, 93, 94, 95, 96, 97, 98, 99, 100, 101, 102, 103, 104, 105, 106, 107, or 108) of SEQ ID NO: 525, and ends at any one of amino acids 189-191 (e.g., amino acid residues 189, 190, or 191) of SEQ ID NO: 525. In some embodiments, heteromultimers of the disclosure comprise at least one Cryptic polypeptide that is at least 70%, 75%, 80%, 85%, 90%, 91%, 92%, 93%, 94%, 95%, 96%, 97%, 98%, 99%, or 100% identical to amino acids of 26-191 of SEQ ID NO: 525. In some embodiments, heteromultimers of the disclosure comprise at least one Cryptic polypeptide that is at least 70%, 75%, 80%, 85%, 90%, 91%, 92%, 93%, 94%, 95%, 96%, 97%, 98%, 99%, or 100% identical to amino acids of 108-189 of SEQ ID NO: 525. In some embodiments, heteromultimers of the disclosure comprise at least one Cryptic polypeptide that is at least 70%, 75%, 80%, 85%, 90%, 91%, 92%, 93%, 94%, 95%, 96%, 97%, 98%, 99%, or 100% identical to a polypeptide that begins at any one of amino acids of 26-109 (e.g., amino acid residues 26, 27, 28, 29, 30, 31, 32, 33, 34, 35, 36, 37, 38, 39, 40, 41, 42, 43, 44, 45, 46, 47, 48, 49, 50, 51, 52, 53, 54, 55, 56, 57, 58, 59, 60, 61, 62, 63, 64, 65, 66, 67, 68, 69, 70, 71, 72, 73, 74, 75, 76, 77, 78, 79, 80, 81, 82, 83, 84, 85, 86, 87, 88, 89, 90, 91, 92, 93, 94, 95, 96, 97, 98, 99, 100, 101, 102, 103, 104, 105, 106, 107, 108 or 109) of SEQ ID NO: 529, and ends at any one of amino acids 139-148 (e.g., amino acid residues 139, 140, 141, 142, 143, 144, 145, 146, 147, or 148) of SEQ ID NO: 529. In some embodiments, heteromultimers of the disclosure comprise at least one Cryptic polypeptide that is at least 70%, 75%, 80%, 85%, 90%, 91%, 92%, 93%, 94%, 95%, 96%, 97%, 98%, 99%, or 100% identical to amino acids of 26-148 of SEQ ID NO: 529. In some embodiments, heteromultimers of the disclosure comprise at least one Cryptic polypeptide that is at least 70%, 75%, 80%, 85%, 90%, 91%, 92%, 93%, 94%, 95%, 96%, 97%, 98%, 99%, or 100% identical to amino acids of 109-139 of SEQ ID NO: 529. In some embodiments, heteromultimers of the disclosure comprise at least one Cryptic polypeptide that is at least 70%, 75%, 80%, 85%, 90%, 91%, 92%, 93%, 94%, 95%, 96%, 97%, 98%, 99%, or 100% identical to amino acids of 26-94 of SEQ ID NO: 529.

[0504] The term “Cryptic family protein 1B polypeptide” includes polypeptides comprising any naturally occurring Cryptic family protein 1B protein (encoded by CFC1B or one of its nonhuman orthologs) as well as any variants thereof (including mutants, fragments, fusions, and peptidomimetic forms) that retain a useful activity.

[0505] The human Cryptic family protein 1B precursor protein sequence (NCBI Ref Seq NP_001072998.1) is as follows:

| (SEQ ID NO: 533) | |
|---|---|
| 1 | MTWRHHVRLL FTVSLALQII NLGNSYQREK HNGGREEVTK VATQKHRQSP LNWTSSHFGE |
| 61 | VTGSAEGWGP EEPLPYSWAF GEGASARPRC CRNGGTCVLG SFCVCPAHFT GRYCEHDQRR |
| 121 | SECGALEHGA WTLRACHLCR CIFGALHCLP LQTPDRCDPK DFLASHAHGP SAGGAPSLLL |
| 181 | LLPCALLHRL LRPDAPAHPR SLVPSVLQRE RRPCGRPGLG HRL |

[0506] The signal peptide is indicated by single underline.

[0507] A processed Cryptic family protein 1B polypeptide sequence is as follows:

(SEQ ID NO: 534)

YQREKHNGGREEVTKVATQKHRQSPLNWTSSHFGEVTGSAEGWGPEEPLP
YSWAFGEGASARPRCCRNGGTCVLGSFCVCPAHFTGRYCEHDQRRSECG
ALEHGAWTLRACHLCRCIFGALHCLPLQTPDRCDPKDFLASHAHG

[0508] A nucleic acid sequence encoding unprocessed human Cryptic family protein 1B precursor protein is shown below (SEQ ID NO: 535), corresponding to nucleotides 392-1060 of NCBI Reference Sequence NM_001079530.1. The signal sequence is underlined.

(SEQ ID NO: 535)

ATGACCTGGAGGCACCATGTCAGGCTTCTGTTTACGGTCAGTTTGGCATT
ACAGATCATCAATTTGGGAAACAGCTATCAAAGAGAGAAACATAACGGCG
GTAGAGAGGAAGTCACCAAGGTTGCCACTCAGAAGCACCGACAGTCACCG
CTCAACTGGACCTCCAGTCATTTCGGAGAGGTGACTGGGAGCGCCGAGGG
CTGGGGGCCGGAGGAGCCGCTCCCATACTCCTGGGCTTTCGGAGAGGGTG
CGTCCGCGCGGCCGCGCTGCTGCAGGAACGGCGGTACCTGCGTGCTGGGC
AGCTTCTGCGTGTGCCCGGCCCACTTCACCGGCCGCTACTGCGAGCATGA
CCAGAGGCGCAGTGAATGCGGCGCCCTGGAGCACGGAGCCTGGACCCTCC
GCGCCTGCCACCTCTGCAGGTGCATCTTCGGGGCCCTGCACTGCCTCCCC
CTCCAGACGCCTGACCGCTGTGACCCGAAAGACTTCCTGGCCTCCCACGC
TCACGGGCCGAGCGCCGGGGGCGCGCCCAGCCTGCTACTCTTGCTGCCCT
GCGCACTCCTGCACCGCCTCCTGCGCCCGGATGCGCCCGCGCACCCTCGG
TCCCTGGTCCCTTCCGTCCTCCAGCGGGAGCGGCGCCCCTGCGGAAGGCC
GGGACTTGGGCATCGCCTT

[0509] A nucleic acid sequence encoding a processed Cryptic family protein 1B is shown below (SEQ ID NO: 536):

(SEQ ID NO: 536)

TATCAAAGAGAGAAACATAACGGCGGTAGAGAGGAAGTCACCAAGGTTGC
CACTCAGAAGCACCGACAGTCACCGCTCAACTGGACCTCCAGTCATTTCG
GAGAGGTGACTGGGAGCGCCGAGGGCTGGGGGCCGGAGGAGCCGCTCCCA
TACTCCTGGGCTTTCGGAGAGGGTGCGTCCGCGCGGCCGCGCTGCTGCAG
GAACGGCGGTACCTGCGTGCTGGGCAGCTTCTGCGTGTGCCCGGCCCACT
TCACCGGCCGCTACTGCGAGCATGACCAGAGGCGCAGTGAATGCGGCGCC
CTGGAGCACGGAGCCTGGACCCTCCGCGCCTGCCACCTCTGCAGGTGCAT
CTTCGGGGCCCTGCACTGCCTCCCCCTCCAGACGCCTGACCGCTGTGACC
CGAAAGACTTCCTGGCCTCCCACGCTCACGGG

[0510] In certain embodiments, the disclosure relates to heteromultimers that comprise at least one Cryptic family protein 1B polypeptide, which includes fragments, functional variants, and modified forms thereof. Preferably, Cryptic family protein 1B polypeptides for use in accordance with the disclosure (e.g., heteromultimers comprising a Cryptic family protein 1B polypeptide and uses thereof) are soluble (e.g., an extracellular domain of Cryptic family protein 1B). In other preferred embodiments, Cryptic family protein 1B polypeptides for use in accordance with the disclosure bind to and/or inhibit (antagonize) activity (e.g., Smad signaling) of one or more TGF-beta superfamily ligands. In some embodiments, heteromultimers of the disclosure comprise at least one Cryptic family protein 1B polypeptide that is at least 70%, 75%, 80%, 85%, 90%, 91%, 92%, 93%, 94%, 95%, 96%, 97%, 98%, 99%, or 100% identical to the amino acid sequence of SEQ ID NOs: 533 or 534. In some embodiments, heteromultimers of the disclosure comprise at least one Cryptic family protein 1B polypeptide that is at least 70%, 75%, 80%, 85%, 90%, 91%, 92%, 93%, 94%, 95%, 96%, 97%, 98%, 99%, or 100% identical to a polypeptide that begins at any one of amino acids of 26-30 (e.g., amino acid residues 26, 27, 28, 29, or 30) of SEQ ID NO: 533, and ends at any one of amino acids 82-223 (e.g., amino acid residues 82, 83, 84, 85, 86, 57, 88, 89, 90, 91, 92, 93, 94, 95, 96, 97, 98, 99, 100, 101, 102, 103, 104, 105, 106, 107, 108, 109, 110, 111, 112, 113, 114, 115, 116, 117, 118, 119, 120, 121, 122, 123, 124, 125, 126, 127, 128, 129, 130, 131, 132, 133, 134, 135, 136, 137, 138, 139, 140, 141, 142, 143, 144, 145, 146, 147, 148, 149, 150, 151, 152, 153, 154, 155, 156, 157, 158, 159, 160, 161, 162, 163, 164, 165, 166, 167, 168, 169, 170, 171, 172, 173, 174, 175, 178, 179, 180, 181, 182, 183, 184, 185, 186, 187, 188, 189, 190, 191, 192, 193, 194, 195, 196, 197, 198, 199, 200, 201, 202, 203, 204, 205, 206, 207, 208, 209, 210, 211, 212, 213, 214, 215, 126, 217, 218, 219, 220, 221, 222, or 223) of SEQ ID NO: 533. In some embodiments, heteromultimers of the disclosure comprise at least one Cryptic family protein 1B polypeptide that is at least 70%, 75%, 80%, 85%, 90%, 91%, 92%, 93%, 94%, 95%, 96%, 97%, 98%, 99%, or 100% identical to amino acids of 26-223 of SEQ ID NO: 533. In some embodiments, heteromultimers of the disclosure comprise at least one Cryptic family protein 1B polypeptide that is at least 70%, 75%, 80%, 85%, 90%, 91%, 92%, 93%, 94%, 95%, 96%, 97%, 98%, 99%, or 100% identical to amino acids of 26-82 of SEQ ID NO: 533. In some embodiments, heteromultimers of the disclosure comprise at least one Cryptic family protein 1B polypeptide that is at least 70%, 75%, 80%, 85%, 90%, 91%, 92%, 93%, 94%, 95%, 96%, 97%, 98%, 99%, or 100% identical to amino acids of 30-82 of SEQ ID NO: 533. In some embodiments, heteromultimers of the disclosure comprise at least one Cryptic family protein 1B polypeptide that is at least 70%, 75%, 80%, 85%, 90%, 91%, 92%, 93%, 94%, 95%, 96%, 97%, 98%, 99%, or 100% identical to amino acids of 30-223 of SEQ ID NO: 533. In some embodiments, heteromultimers of the disclosure comprise at least one Cryptic family protein 1B polypeptide that is at least 70%, 75%, 80%, 85%, 90%, 91%, 92%, 93%, 94%, 95%, 96%, 97%, 98%, 99%, or 100% identical to amino acids of 26-169 of SEQ ID NO: 533. In some embodiments, heteromultimers of the disclosure comprise at least one Cryptic family protein 1B polypeptide that is at least 70%, 75%, 80%, 85%, 90%, 91%, 92%, 93%, 94%, 95%, 96%, 97%, 98%, 99%, or 100% identical to amino acids of 30-169 of SEQ ID NO: 533. In some embodiments, heteromultimers of the disclosure comprise at least one Cryptic family protein 1B polypeptide that is at least 70%, 75%, 80%, 85%, 90%, 91%, 92%, 93%, 94%, 95%, 96%, 97%, 98%, 99%, or 100% identical to a polypeptide that begins at any one of amino acids of 26-90 (e.g., amino acid residues 26, 27, 28, 29, 30, 31, 32, 33, 34, 35, 36, 37, 38, 39, 40, 41, 42, 43, 44, 45, 46, 47, 48, 49, 50, 51, 52, 53, 54, 55, 56, 57, 58, 59, 60, 61, 62, 63, 64, 65, 66, 67, 68, 69, 70, 71, 72, 73, 74, 75, 76, 77, 78, 79, 80, 81, 82, 83, 84, 85, 86, 87, 88, 89, or 90) of SEQ ID NO: 533, and ends at any one of amino acids 214-223 (e.g., amino acid residues 214, 215, 126, 217, 218, 219, 220, 221, 222, or 223) of SEQ ID NO: 533. In some embodiments, heteromultimers of the disclosure comprise at least one Cryptic family protein 1B polypeptide that is at least 70%, 75%, 80%, 85%, 90%, 91%, 92%, 93%, 94%, 95%, 96%, 97%, 98%, 99%, or 100% identical to amino acids of 26-223 of SEQ ID NO: 533. In some embodiments, heteromultimers of the disclosure comprise at least one Cryptic family protein 1B polypeptide that is at least 70%, 75%, 80%, 85%, 90%, 91%, 92%, 93%, 94%, 95%, 96%, 97%, 98%, 99%, or 100% identical to amino acids of 90-214 of SEQ ID NO: 533.

[0511] The term “CRIM1 polypeptide” includes polypeptides comprising any naturally occurring polypeptide of a CRIM1 protein (encoded by CRIM1 or one of its nonhuman orthologs) as well as any variants thereof (including mutants, fragments, fusions, and peptidomimetic forms) that retain a useful activity.

[0512] The human CRIM1 precursor protein sequence (NCBI Ref Seq NP_057525.1) is as follows:

| (SEQ ID NO: 537) | |
|---|---|
| 1 | MYLVAGDRGL AGCGHLLVSL LGLLLLLARS GTRALVCLPC DESKCEEPRN CPGSIVQGVC |
| 61 | GCCYTCASQR NESCGGTFGI YGTCDRGLRC VIRPPLNGDS LTEYEAGVCE DENWTDDQLL |
| 121 | GFKPCNENLI AGCNIINGKC ECNTIRTCSN PFEFPSQDMC LSALKRIEEE KPDCSKARCE |
| 181 | VQFSPRCPED SVLIEGYAPP GECCPLPSRC VCNPAGCLRK VCQPGNLNIL VSKASGKPGE |
| 241 | CCDLYECKPV FGVDCRTVEC PPVQQTACPP DSYETQVRLT ADGCCTLPTR CECLSGLCGF |
| 301 | PVCEVGSTPR IVSRGDGTPG KCCDVFECVN DTKPACVFNN VEYYDGDMFR MDNCRFCRCQ |
| 361 | GGVAICFTAQ CGEINCERYY VPEGECCPVC EDPVYPFNNP AGCYANGLIL AHGDRWREDD |
| 421 | CTFCQCVNGE RHCVATVCGQ TCTNPVKVPG ECCPVCEEPT IITVDPPACG ELSNCTLTGK |
| 481 | DCINGFKRDH NGCRTCQCIN TEELCSERKQ GCTLNCPFGF LTDAQNCEIC ECRPRPKKCR |
| 541 | PIICDKYCPL GLLKNKHGCD ICRCKKCPEL SCSKICPLGF QQDSHGCLIC KCREASASAG |
| 601 | PPILSGTCLT VDGHHHKNEE SWHDGCRECY CLNGREMCAL ITCPVPACGN PTIHPGQCCP |
| 661 | SCADDFVVQK PELSTPSICH APGGEYFVEG ETWNIDSCTQ CTCHSGRVLC ETEVCPPLLC |
| 721 | QNPSRTQDSC CPQCTDQPFR PSLSRNNSVP NYCKNDEGDI FLAAESWKPD VCTSCICIDS |
| 781 | VISCFSESCP SVSCERPVLR KGQCCPYCIE DTIPKKVVCH FSGKAYADEE RWDLDSCTHC |
| 841 | YCLQGQTLCS TVSCPPLPCV EPINVEGSCC PMCPEMYVPE PTNIPIEKTN HRGEVDLEVP |
| 901 | [chemical structure] |
| 961 | NQKKQWIPLL CWYRTPTKPS SLNNQLVSVD CKKGTRVQVD SSQRMLRIAE PDARFSGFYS |
| 1021 | MQKQNHLQAD NFYQTV |

[0513] The signal peptide is indicated by a single underline, the extracellular domain is indicated by bold, and the transmembrane domain is indicated by dotted underline.

[0514] A mature CRIM1 sequence is as follows:

(SEQ ID NO: 538)

LVCLPCDESKCEEPRNCPGSIVQGVCGCCYTCASQRNESCGGTFGIYGTC
DRGLRCVIRPPLNGDSLTEYEAGVCEDENWTDDQLLGFKPCNENLIAGCN
IINGKCECNTIRTCSNPFEFPSQDMCLSALKRIEEEKPDCSKARCEVQFS
PRCPEDSVLIEGYAPPGECCPLPSRCVCNPAGCLRKVCQPGNLNILVSKA
SGKPGECCDLYECKPVFGVDCRTVECPPVQQTACPPDSYETQVRLTADGC
CTLPTCECLSGLCGFPVCEVGSTPRIVSRGDGTPGKCCDVFECVNDTKPA
CVFNNVEYYDGDMFRMDNCRFCRCQGGVAICFTAQCGEINCERYYVPEGE
CCPVCEDPVYPFNNPAGCYANGLILAHGDRWREDDCTFCQCVNGERHCVA
TVCGQTCTNPVKVPGECCPVCEEPTIITVDPPACGELSNCTLTGKDCING
FKRDHNGCRTCQCINTEELCSERKQGCTLNCPFGFLTDAQNCEICECRPR
PKKCRPIICDKYCPLGLLKNKHGCDICRCKKCPELSCSKICPLGFQQDSH
GCLICKCREASASAGPPILSGTCLTVDGHHHKNEESWHDGCRECYCLNGR
EMCALITCPVPACGNPTIHPGQCCPSCADDFVVQKPELSTPSICHAPGGE
YFVEGETWNIDSCTQCTCHSGRVLCETEVCPPLLCQNPSRTQDSCCPQCT
DQPFRPSLSRNNSVPNYCKNDEGDIFLAAESWKPDVCTSCICIDSVISCF
SESCPSVSCERPVLRKGQCCPYCIEDTIPKKVVCHFSGKAYADEERWDLD
SCTHCYCLQGQTLCSTVSCPPLPCVEPINVEGSCCPMCPEMYVPEPTNIP
IEKTNHRGEVDLEVPLWPTPSENDIVHLPRDMGHLQVDYRDNRLHPSEDS
SLDS

[0515] A nucleic acid sequence encoding unprocessed human CRIM1 precursor protein is shown below (SEQ ID NO: 539), corresponding to nucleotides 67-3174 of NCBI Reference Sequence NM_016441.2. The signal sequence is indicated by solid underline and the transmembrane region by dotted underline.

(SEQ ID NO: 539)
ATGTACTTGGTGGCGGGGGACAGGGGGTTGGCCGGCTGCGGGCACCTCCTGGTCTCGCTGCTGGGGCTGCTGCTG
CTGCTGGCGCGCTCCGGCACCCGGGCGCTGGTCTGCCTGCCCTGTGACGAGTCCAAGTGCGAGGAGCCCAGGAAC
TGCCCGGGGAGCATCGTGCAGGGCGTCTGCGGCTGCTGCTACACGTGCGCCAGCCAGAGGAACGAGAGCTGCGGC
GGCACCTTCGGGATTTACGGAACCTGCGACCGGGGGCTGCGTTGTGTCATCCGCCCCCCGCTCAATGGCGACTCC
CTCACCGAGTACGAAGCGGGCGTTTGCGAAGATGAGAACTGGACTGATGACCAACTGCTTGGTTTTAAACCATGC
AATGAAAACCTTATTGCTGGCTGCAATATAATCAATGGGAAATGTGAATGTAACACCATTCGAACCTGCAGCAAT
CCCTTTGAGTTTCCAAGTCAGGATATGTGCCTTTCAGCTTTAAAGAGAATTGAAGAAGAGAAGCCAGATTGCTCC
AAGGCCCGCTGTGAAGTCCAGTTCTCTCCACGTTGTCCTGAAGATTCTGTTCTGATCGAGGGTTATGCTCCTCCT
GGGGAGTGCTGTCCCTTACCCAGCCGCTGCGTGTGCAACCCCGCAGGCTGTCTGCGCAAAGTCTGCCAGCCGGGA
AACCTGAACATACTAGTGTCAAAAGCCTCAGGGAAGCCGGGAGAGTGCTGTGACCTCTATGAGTGCAAACCAGTT
TTCGGCGTGGACTGCAGGACTGTGGAATGCCCTCCTGTTCAGCAGACCGCGTGTCCCCCGGACAGCTATGAAACT
CAAGTCAGACTAACTGCAGATGGTTGCTGTACTTTGCCAACAAGATGCGAGTGTCTCTCTGGCTTATGTGGTTTC
CCCGTGTGTGAGGTGGGATCCACTCCCCGCATAGTCTCTCGTGGCGATGGGACACCTGGAAAGTGCTGTGATGTC
TTTGAATGTGTTAATGATACAAAGCCAGCCTGCGTATTTAACAATGTGGAATATTATGATGGAGACATGTTTCGA
ATGGACAACTGTCGGTTCTGTCGATGCCAAGGGGGCGTTGCCATCTGCTTCACCGCCCAGTGTGGTGAGATAAAC
TGCGAGAGGTACTACGTGCCCGAAGGAGAGTGCTGCCCAGTGTGTGAAGATCCAGTGTATCCTTTTAATAATCCC
GCTGGCTGCTATGCCAATGGCCTGATCCTTGCCCACGGAGACCGGTGGCGGGAAGACGACTGCACATTCTGCCAG
TGCGTCAACGGTGAACGCCACTGCGTTGCGACCGTCTGCGGACAGACCTGCACAAACCCTGTGAAAGTGCCTGGG
GAGTGTTGCCCTGTGTGCGAAGAACCAACCATCATCACAGTTGATCCACCTGCATGTGGGGAGTTATCAAACTGC
ACTCTGACAGGGAAGGACTGCATTAATGGTTTCAAACGCGATCACAATGGTTGTCGGACCTGTCAGTGCATAAAC
ACCGAGGAACTATGTTCAGAACGTAAACAAGGCTGCACCTTGAACTGTCCCTTCGGTTTCCTTACTGATGCCCAA
AACTGTGAGATCTGTGAGTGCCGCCCAAGGCCCAAGAAGTGCAGACCCATAATCTGTGACAAGTATTGTCCACTT
GGATTGCTGAAGAATAAGCACGGCTGTGACATCTGTCGCTGTAAGAAATGTCCAGAGCTCTCATGCAGTAAGATC
TGCCCCTTGGGTTTCCAGCAGGACAGTCACGGCTGTCTTATCTGCAAGTGCAGAGAGGCCTCTGCTTCAGCTGGG
CCACCCATCCTGTCGGGCACTTGTCTCACCGTGGATGGTCATCATCATAAAAATGAGGAGAGCTGGCACGATGGG
TGCCGGGAATGCTACTGTCTCAATGGACGGGAAATGTGTGCCCTGATCACCTGCCCGGTGCCTGCCTGTGGCAAC
CCCACCATTCACCCTGGACAGTGCTGCCCATCATGTGCAGATGACTTTGTGGTGCAGAAGCCAGAGCTCAGTACT
CCCTCCATTTGCCACGCCCCTGGAGGAGAATACTTTGTGGAAGGAGAAACGTGGAACATTGACTCCTGTACTCAG
TGCACCTGCCACAGCGGACGGGTGCTGTGTGAGACAGAGGTGTGCCCACCGCTGCTCTGCCAGAACCCCTCACGC
ACCCAGGATTCCTGCTGCCCACAGTGTACAGATCAACCTTTTCGGCCTTCCTTGTCCCGCAATAACAGCGTACCT
AATTACTGCAAAAATGATGAAGGGGATATATTCCTGGCAGCTGAGTCCTGGAAGCCTGACGTTTGTACCAGCTGC
ATCTGCATTGATAGCGTAATTAGCTGTTTCTCTGAGTCCTGCCCTTCTGTATCCTGTGAAAGACCTGTCTTGAGA
AAAGGCCAGTGTTGTCCCTACTGCATAGAAGACACAATTCCAAAGAAGGTGGTGTGCCACTTCAGTGGGAAGGCC
TATGCCGACGAGGAGCGGTGGGACCTTGACAGCTGCACCCACTGCTACTGCCTGCAGGGCCAGACCCTCTGCTCG
ACCGTCAGCTGCCCCCCTCTGCCCTGTGTTGAGCCCATCAACGTGGAAGGAAGTTGCTGCCCAATGTGTCCAGAA
ATGTATGTCCCAGAACCAACCAATATACCCATTGAGAAGACAAACCATCGAGGAGAGGTTGACCTGGAGGTTCCC
CTGTGGCCCACGCCTAGTGAAAATGATATCGTCCATCTCCCTAGAGATATGGGTCACCTCCAGGTAGATTACAGA

[chemical structure]

[chemical structure]

CCAACTAAGCCTTCTTCCTTAAATAATCAGCTAGTATCTGTGGACTGCAAGAAAGGAACCAGAGTCCAGGTGGAC
AGTTCCCAGAGAATGCTAAGAATTGCAGAACCAGATGCAAGATTCAGTGGCTTCTACAGCATGCAAAAACAGAAC
CATCTACAGGCAGACAATTTCTACCAAACAGTG

[0516] A nucleic acid sequence encoding processed extracellular human CRIM1 is shown below (SEQ ID NO: 540):

(SEQ ID NO: 540)

CTGGTCTGCCTGCCCTGTGACGAGTCCAAGTGCGAGGAGCCCAGGAACTG
CCCGGGGAGCATCGTGCAGGGCGTCTGCGGCTGCTGCTACACGTGCGCCA
GCCAGAGGAACGAGAGCTGCGGCGGCACCTTCGGGATTTACGGAACCTGC
GACCGGGGGCTGCGTTGTGTCATCCGCCCCCCGCTCAATGGCGACTCCCT
CACCGAGTACGAAGCGGGCGTTTGCGAAGATGAGAACTGGACTGATGACC
AACTGCTTGGTTTTAAACCATGCAATGAAAACCTTATTGCTGGCTGCAAT
ATAATCAATGGGAAATGTGAATGTAACACCATTCGAACCTGCAGCAATCC
CTTTGAGTTTCCAAGTCAGGATATGTGCCTTTCAGCTTTAAAGAGAATTG
AAGAAGAGAAGCCAGATTGCTCCAAGGCCCGCTGTGAAGTCCAGTTCTCT
CCACGTTGTCCTGAAGATTCTGTTCTGATCGAGGGTTATGCTCCTCCTGG
GGAGTGCTGTCCCTTACCCAGCCGCTGCGTGTGCAACCCCGCAGGCTGTC
TGCGCAAAGTCTGCCAGCCGGGAAACCTGAACATACTAGTGTCAAAAGCC
TCAGGGAAGCCGGGAGAGTGCTGTGACCTCTATGAGTGCAAACCAGTTTT
CGGCGTGGACTGCAGGACTGTGGAATGCCCTCCTGTTCAGCAGACCGCGT
GTCCCCCGGACAGCTATGAAACTCAAGTCAGACTAACTGCAGATGGTTGC
TGTACTTTGCCAACAAGATGCGAGTGTCTCTCTGGCTTATGTGGTTTCCC
CGTGTGTGAGGTGGGATCCACTCCCCGCATAGTCTCTCGTGGCGATGGGA
CACCTGGAAAGTGCTGTGATGTCTTTGAATGTGTTAATGATACAAAGCCA
GCCTGCGTATTTAACAATGTGGAATATTATGATGGAGACATGTTTCGAAT
GGACAACTGTCGGTTCTGTCGATGCCAAGGGGGCGTTGCCATCTGCTTCA
CCGCCCAGTGTGGTGAGATAAACTGCGAGAGGTACTACGTGCCCGAAGGA
GAGTGCTGCCCAGTGTGTGAAGATCCAGTGTATCCTTTTAATAATCCCGC
TGGCTGCTATGCCAATGGCCTGATCCTTGCCCACGGAGACCGGTGGCGGG
AAGACGACTGCACATTCTGCCAGTGCGTCAACGGTGAACGCCACTGCGTT
GCGACCGTCTGCGGACAGACCTGCACAAACCCTGTGAAAGTGCCTGGGGA
GTGTTGCCCTGTGTGCGAAGAACCAACCATCATCACAGTTGATCCACCTG
CATGTGGGGAGTTATCAAACTGCACTCTGACAGGGAAGGACTGCATTAAT
GGTTTCAAACGCGATCACAATGGTTGTCGGACCTGTCAGTGCATAAACAC
CGAGGAACTATGTTCAGAACGTAAACAAGGCTGCACCTTGAACTGTCCCT
TCGGTTTCCTTACTGATGCCCAAAACTGTGAGATCTGTGAGTGCCGCCCA
AGGCCCAAGAAGTGCAGACCCATAATCTGTGACAAGTATTGTCCACTTGG
ATTGCTGAAGAATAAGCACGGCTGTGACATCTGTCGCTGTAAGAAATGTC
CAGAGCTCTCATGCAGTAAGATCTGCCCCTTGGGTTTCCAGCAGGACAGT
CACGGCTGTCTTATCTGCAAGTGCAGAGAGGCCTCTGCTTCAGCTGGGCC
ACCCATCCTGTCGGGCACTTGTCTCACCGTGGATGGTCATCATCATAAAA
ATGAGGAGAGCTGGCACGATGGGTGCCGGGAATGCTACTGTCTCAATGGA
CGGGAAATGTGTGCCCTGATCACCTGCCCGGTGCCTGCCTGTGGCAACCC
CACCATTCACCCTGGACAGTGCTGCCCATCATGTGCAGATGACTTTGTGG
TGCAGAAGCCAGAGCTCAGTACTCCCTCCATTTGCCACGCCCCTGGAGGA
GAATACTTTGTGGAAGGAGAAACGTGGAACATTGACTCCTGTACTCAGTG
CACCTGCCACAGCGGACGGGTGCTGTGTGAGACAGAGGTGTGCCCACCGC
TGCTCTGCCAGAACCCCTCACGCACCCAGGATTCCTGCTGCCCACAGTGT
ACAGATCAACCTTTTCGGCCTTCCTTGTCCCGCAATAACAGCGTACCTAA
TTACTGCAAAAATGATGAAGGGGATATATTCCTGGCAGCTGAGTCCTGGA
AGCCTGACGTTTGTACCAGCTGCATCTGCATTGATAGCGTAATTAGCTGT
TTCTCTGAGTCCTGCCCTTCTGTATCCTGTGAAAGACCTGTCTTGAGAAA
AGGCCAGTGTTGTCCCTACTGCATAGAAGACACAATTCCAAAGAAGGTGG
TGTGCCACTTCAGTGGGAAGGCCTATGCCGACGAGGAGCGGTGGGACCTT
GACAGCTGCACCCACTGCTACTGCCTGCAGGGCCAGACCCTCTGCTCGAC
CGTCAGCTGCCCCCCTCTGCCCTGTGTTGAGCCCATCAACGTGGAAGGAA
GTTGCTGCCCAATGTGTCCAGAAATGTATGTCCCAGAACCAACCAATATA
CCCATTGAGAAGACAAACCATCGAGGAGAGGTTGACCTGGAGGTTCCCCT
GTGGCCCACGCCTAGTGAAAATGATATCGTCCATCTCCCTAGAGATATGG
GTCACCTCCAGGTAGATTACAGAGATAACAGGCTGCACCCAAGTGAAGAT
TCTTCACTGGACTCC

[0517] In certain embodiments, the disclosure relates to heteromultimers that comprise at least one CRIM1 polypeptide, which includes fragments, functional variants, and modified forms thereof. Preferably, CRIM1 polypeptides for use in accordance with the disclosure (e.g., heteromultimers comprising a CRIM1 polypeptide and uses thereof) are soluble (e.g., an extracellular domain of CRIM1). In other preferred embodiments, CRIM1 polypeptides for use in accordance with the disclosure bind to and/or inhibit (antagonize) activity (e.g., Smad signaling) of one or more TGF-beta superfamily ligands. In some embodiments, heteromultimers of the disclosure comprise at least one CRIM1 polypeptide that is at least 70%, 75%, 80%, 85%, 90%, 91%, 92%, 93%, 94%, 95%, 96%, 97%, 98%, 99%, or 100% identical to the amino acid sequence of SEQ ID NOs: 537 or 538. In some embodiments, heteromultimers of the disclosure comprise at least one CRIM1 polypeptide that is at least 70%, 75%, 80%, 85%, 90%, 91%, 92%, 93%, 94%, 95%, 96%, 97%, 98%, 99%, or 100% identical to a polypeptide that begins at any one of amino acids of 35-37 (e.g., amino acid residues 35, 36, or 37) of SEQ ID NO: 537, and ends at any one of amino acids 873-939 (e.g., amino acid residues 873, 874, 875, 876, 877, 878, 879, 880, 881, 882, 883, 884, 885, 886, 887, 888, 889, 890, 891, 892, 893, 894, 895, 896, 897, 898, 899, 900, 901, 902, 903, 904, 905, 906, 907, 908, 909, 910, 911, 912, 913, 914, 915, 916, 917, 918, 919, 920, 921, 922, 923, 924, 925, 926, 927, 928, 929, 930, 931, 932, 933, 934, 935, 936, 937, 938, or 939) of SEQ ID NO: 537. In some embodiments, heteromultimers of the disclosure comprise at least one CRIM1 polypeptide that is at least 70%, 75%, 80%, 85%, 90%, 91%, 92%, 93%, 94%, 95%, 96%, 97%, 98%, 99%, or 100% identical to amino acids of 35-939 of SEQ ID NO: 537. In some embodiments, heteromultimers of the disclosure comprise at least one CRIM1 polypeptide that is at least 70%, 75%, 80%, 85%, 90%, 91%, 92%, 93%, 94%, 95%, 96%, 97%, 98%, 99%, or 100% identical to amino acids of 37-939 of SEQ ID NO: 537. In some embodiments, heteromultimers of the disclosure comprise at least one CRIM1 polypeptide that is at least 70%, 75%, 80%, 85%, 90%, 91%, 92%, 93%, 94%, 95%, 96%, 97%, 98%, 99%, or 100% identical to amino acids of 35-873 of SEQ ID NO: 537. In some embodiments, heteromultimers of the disclosure comprise at least one CRIM1 polypeptide that is at least 70%, 75%, 80%, 85%, 90%, 91%, 92%, 93%, 94%, 95%, 96%, 97%, 98%, 99%, or 100% identical to amino acids of 37-939 of SEQ ID NO: 537.

[0518] The term “CRIM2 polypeptide” includes polypeptides comprising any naturally occurring CRIM2 protein (encoded by KCP or one of its nonhuman orthologs) as well as any variants thereof (including mutants, fragments, fusions, and peptidomimetic forms) that retain a useful activity.

[0519] A human CRIM2 isoform 1 precursor protein sequence (NCBI Ref Seq NP_001129386.1) is as follows:

| (SEQ ID NO: 541) | |
|---|---|
| 1 | MAGVGAAALS LLLHLGALAL AAGAEGGAVP REPPGQQTTA HSSVLAGNSQ EQWHPLREWL |
| 61 | GRLEAAVMEL REQNKDLQTR VRQLESCECH PASPQCWGLG RAWPEGARWE PDACTACVCQ |
| 121 | DGAAHCGPQA HLPHCRGCSQ NGQTYGNGET FSPDACTTCR CLTGAVQCQG PSCSELNCLE |
| 181 | SCTPPGECCP ICCTEGGSHW EHGQEWTTPG DPCRICRCLE GHIQCRQREC ASLCPYPARP |
| 241 | LPGTCCPVCD GCFLNGREHR SGEPVGSGDP CSHCRCANGS VQCEPLPCPP VPCRHPGKIP |
| 301 | GQCCPVCDGC EYQGHQYQSQ ETFRLQERGL CVRCSCQAGE VSCEEQECPV TPCALPASGR |
| 361 | QLCPACELDG EEFAEGVQWE PDGRPCTACV CQDGVPKCGA VLCPPAPCQH PTQPPGACCP |
| 421 | SCDSCTYHSQ VYANGQNFTD ADSPCHACHC QDGTVTCSLV DCPPTTCARP QSGPGQCCPR |
| 481 | CPDCILEEEV FVDGESFSHP RDPCQECRCQ EGHAHCQPRP CPRAPCAHPL PGTCCPNDCS |
| 541 | GCAFGGKEYP SGADFPHPSD PCRLCRCLSG NVQCLARRCV PLPCPEPVLL PGECCPQCPA |
| 601 | PAGCPRPGAA HARHQEYFSP PGDPCRRCLC LDGSVSCQRL PCPPAPCAHP RQGPCCPSCD |
| 661 | GCLYQGKEFA SGERFPSPTA ACHLCLCWEG SVSCEPKACA PALCPFPARG DCCPDCDGCE |
| 721 | YLGESYLSNQ EFPDPREPCN LCTCLGGFVT CGRRPCEPPG CSHPLIPSGH CCPTCQGCRY |
| 781 | HGVTTASGET LPDPLDPTCS LCTCQEGSMR CQKKPCPPAL CPHPSPGPCF CPVCHSCLSQ |
| 841 | GREHQDGEEF EGPAGSCEWC RCQAGQVSCV RLQCPPLPCK LQVTERGSCC PRCRGCLAHG |
| 901 | EEHPEGSRWV PPDSACSSCV CHEGVVTCAR IQCISSCAQP RQGPHDCCPQ CSDCEHEGRK |
| 961 | YEPGESFQPG ADPCEVCICE PQPEGPPSLR CHRRQCPSLV GCPPSQLLPP GPQHCCPTCA |
| 1021 | EALSNCSEGL LGSELAPPDP CYTCQCQDLT WLCIHQACPE LSCPLSERHT PPGSCCPVCR |
| 1081 | APTQSCVHQG REVASGERWT VDTCTSCSCM AGTVRCQSQR CSPLSCGPDK APALSPGSCC |
| 1141 | PRCLPRPASC MAFGDPHYRT FDGRLLHFQG SCSYVLAKDC HSGDFSVHVT NDDRGRSGVA |
| 1201 | WTQEVAVLLG DMAVRLLQDG AVTVDGHPVA LPFLQEPLLY VELRGHTVIL HAQPGLQVLW |
| 1261 | DGQSQVEVSV PGSYQGRTCG LCGNFNGFAQ DDLQGPEGLL LPSEAAFGNS WQVSEGLWPG |
| 1321 | RPCSAGREVD PCRAAGYRAR REANARCGVL KSSPFSRCHA VVPPEPFFAA CVYDLCACGP |
| 1381 | GSSADACLCD ALEAYASHCR QAGVTPTWRG PTLCVVGCPL ERGFVFDECG PPCPRTCFNQ |
| 1441 | HIPLGELAAH CVRPCVPGCQ CPAGLVEHEA HCIPPEACPQ VLLTGDQPLG ARPSPSREPQ |
| 1501 | ETP |

[0520] The signal peptide is indicated by single underline.

[0521] A processed CRIM2 isoform 1 polypeptide sequence is as follows:

(SEQ ID NO: 542)

GAVPREPPGQQTTAHSSVLAGNSQEQWHPLREWLGRLEAAVMELREQNKD
LQTRVRQLESCECHPASPQCWGLGRAWPEGARWEPDACTACVCQDGAAHC
GPQAHLPHCRGCSQNGQTYGNGETFSPDACTTCRCLTGAVQCQGPSCSEL
NCLESCTPPGECCPICCTEGGSHWEHGQEWTTPGDPCRICRCLEGHIQCR
QRECASLCPYPARPLPGTCCPVCDGCFLNGREHRSGEPVGSGDPCSHCRC
ANGSVQCEPLPCPPVPCRHPGKIPGQCCPVCDGCEYQGHQYQSQETFRLQ
ERGLCVRCSCQAGEVSCEEQECPVTPCALPASGRQLCPACELDGEEFAEG
VQWEPDGRPCTACVCQDGVPKCGAVLCPPAPCQHPTQPPGACCPSCDSCT
YHSQVYANGQNFTDADSPCHACHCQDGTVTCSLVDCPPTTCARPQSGPGQ
CCPRCPDCILEEEVFVDGESFSHPRDPCQECRCQEGHAHCQPRPCPRAPC
AHPLPGTCCPNDCSGCAFGGKEYPSGADFPHPSDPCRLCRCLSGNVQCLA
RRCVPLPCPEPVLLPGECCPQCPAPAGCPRPGAAHARHQEYFSPPGDPCR
RCLCLDGSVSCQRLPCPPAPCAHPRQGPCCPSCDGCLYQGKEFASGERFP
SPTAACHLCLCWEGSVSCEPKACAPALCPFPARGDCCPDCDGCEYLGESY
LSNQEFPDPREPCNLCTCLGGFVTCGRRPCEPPGCSHPLIPSGHCCPTCQ
GCRYHGVTTASGETLPDPLDPTCSLCTCQEGSMRCQKKPCPPALCPHPSP
GPCFCPVCHSCLSQGREHQDGEEFEGPAGSCEWCRCQAGQVSCVRLQCPP
LPCKLQVTERGSCCPRCRGCLAHGEEHPEGSRWVPPDSACSSCVCHEGVV
TCARIQCISSCAQPRQGPHDCCPQCSDCEHEGRKYEPGESFQPGADPCEV
CICEPQPEGPPSLRCHRRQCPSLVGCPPSQLLPPGPQHCCPTCAEALSNC
SEGLLGSELAPPDPCYTCQCQDLTWLCIHQACPELSCPLSERHTPPGSCC
PVCRAPTQSCVHQGREVASGERWTVDTCTSCSCMAGTVRCQSQRCSPLSC
GPDKAPALSPGSCCPRCLPRPASCMAFGDPHYRTFDGRLLHFQGSCSYVL
AKDCHSGDFSVHVTNDDRGRSGVAWTQEVAVLLGDMAVRLLQDGAVTVDG
HPVALPFLQEPLLYVELRGHTVILHAQPGLQVLWDGQSQVEVSVPGSYQG
RTCGLCGNFNGFAQDDLQGPEGLLLPSEAAFGNSWQVSEGLWPGRPCSAG
REVDPCRAAGYRARREANARCGVLKSSPFSRCHAVVPPEPFFAACVYDLC
ACGPGSSADACLCDALEAYASHCRQAGVTPTWRGPTLCVVGCPLERGFVF
DECGPPCPRTCFNQHIPLGELAAHCVRPCVPGCQCPAGLVEHEAHCIPPE
ACPQVLLTGDQPLGARPSPSREPQETP

[0522] A nucleic acid sequence encoding unprocessed human CRIM2 isoform 1 precursor protein is shown below (SEQ ID NO: 543), corresponding to nucleotides 44-4552 of NCBI Reference Sequence NM_001135914.1. The signal sequence is underlined.

(SEQ ID NO: 543)

ATGGCCGGGGTCGGGGCCGCTGCGCTGTCCCTTCTCCTGCACCTCGGGGC
CCTGGCGCTGGCCGCGGGCGCGGAAGGTGGGGCTGTCCCCAGGGAGCCCC
CTGGGCAGCAGACAACTGCCCATTCCTCAGTCCTTGCTGGGAACTCCCAG
GAGCAGTGGCACCCCCTGCGAGAGTGGCTGGGGCGACTGGAGGCTGCAGT
GATGGAGCTCAGAGAACAGAATAAGGACCTGCAGACGAGGGTGAGGCAGC
TGGAGTCCTGTGAGTGCCACCCTGCATCTCCCCAGTGCTGGGGGCTGGGG
CGTGCCTGGCCCGAGGGGGCACGCTGGGAGCCTGACGCCTGCACAGCCTG
CGTCTGCCAGGATGGGGCCGCTCACTGTGGCCCCCAAGCACACCTGCCCC
ATTGCAGGGGCTGCAGCCAAAATGGCCAGACCTACGGCAACGGGGAGACC
TTCTCCCCAGATGCCTGCACCACCTGCCGCTGTCTGACAGGAGCCGTGCA
GTGCCAGGGGCCCTCGTGTTCAGAGCTCAACTGCTTGGAGAGCTGCACCC
CACCTGGGGAGTGCTGCCCCATCTGCTGCACAGAAGGTGGCTCTCACTGG
GAACATGGCCAAGAGTGGACAACACCTGGGGACCCCTGCCGAATCTGCCG
GTGCCTGGAGGGTCACATCCAGTGCCGCCAGCGAGAATGTGCCAGCCTGT
GTCCATACCCAGCCCGGCCCCTCCCAGGCACCTGCTGCCCTGTGTGTGAT
GGCTGTTTCCTAAACGGGCGGGAGCACCGCAGCGGGGAGCCTGTGGGCTC
AGGGGACCCCTGCTCGCACTGCCGCTGTGCTAATGGGAGTGTCCAGTGTG
AGCCTCTGCCCTGCCCGCCAGTGCCCTGCAGACACCCAGGCAAGATCCCT
GGGCAGTGCTGCCCTGTCTGCGATGGCTGTGAGTACCAGGGACACCAGTA
TCAGAGCCAGGAGACCTTCAGACTCCAAGAGCGGGGCCTCTGTGTCCGCT
GCTCCTGCCAGGCTGGCGAGGTCTCCTGTGAGGAGCAGGAGTGCCCAGTC
ACCCCCTGTGCCCTGCCTGCCTCTGGCCGCCAGCTCTGCCCAGCCTGTGA
GCTGGATGGAGAGGAGTTTGCTGAGGGAGTCCAGTGGGAGCCTGATGGTC
GGCCCTGCACCGCCTGCGTCTGTCAAGATGGGGTACCCAAGTGCGGGGCT
GTGCTCTGCCCCCCAGCCCCCTGCCAGCACCCCACCCAGCCCCCTGGTGC
CTGCTGCCCCAGCTGTGACAGCTGCACCTACCACAGCCAAGTGTATGCCA
ATGGGCAGAACTTCACGGATGCAGACAGCCCTTGCCATGCCTGCCACTGT
CAGGATGGAACTGTGACATGCTCCTTGGTTGACTGCCCTCCCACGACCTG
TGCCAGGCCCCAGAGTGGACCAGGCCAGTGTTGCCCCAGGTGCCCAGACT
GCATCCTGGAGGAAGAGGTGTTTGTGGACGGCGAGAGCTTCTCCCACCCC
CGAGACCCCTGCCAGGAGTGCCGATGCCAGGAAGGCCATGCCCACTGCCA
GCCTCGCCCCTGCCCCAGGGCCCCCTGTGCCCACCCGCTGCCTGGGACCT
GCTGCCCGAACGACTGCAGCGGCTGTGCCTTTGGCGGGAAAGAGTACCCC
AGCGGAGCGGACTTCCCCCACCCCTCTGACCCCTGCCGTCTGTGTCGCTG
TCTGAGCGGCAACGTGCAGTGCCTGGCCCGCCGCTGCGTGCCGCTGCCCT
GTCCAGAGCCTGTCCTGCTGCCGGGAGAGTGCTGCCCGCAGTGCCCAGCC
CCCGCCGGCTGCCCACGGCCCGGCGCGGCCCACGCCCGCCACCAGGAGTA
CTTCTCCCCGCCCGGCGATCCCTGCCGCCGCTGCCTCTGCCTCGACGGCT
CCGTGTCCTGCCAGCGGCTGCCCTGCCCGCCCGCGCCCTGCGCGCACCCG
CGCCAGGGGCCTTGCTGCCCCTCCTGCGACGGCTGCCTGTACCAGGGGAA
GGAGTTTGCCAGCGGGGAGCGCTTCCCATCGCCCACTGCTGCCTGCCACC
TCTGCCTTTGCTGGGAGGGCAGCGTGAGCTGCGAGCCCAAGGCATGTGCC
CCTGCACTGTGCCCCTTCCCTGCCAGGGGCGACTGCTGCCCTGACTGTGA
TGGCTGTGAGTACCTGGGGGAGTCCTACCTGAGTAACCAGGAGTTCCCAG
ACCCCCGAGAACCCTGCAACCTGTGTACCTGTCTTGGAGGCTTCGTGACC
TGCGGCCGCCGGCCCTGTGAGCCTCCGGGCTGCAGCCACCCACTCATCCC
CTCTGGGCACTGCTGCCCGACCTGCCAGGGATGCCGCTACCATGGCGTCA
CTACTGCCTCCGGAGAGACCCTTCCTGACCCACTTGACCCTACCTGCTCC
CTCTGCACCTGCCAGGAAGGTTCCATGCGCTGCCAGAAGAAGCCATGTCC
CCCAGCTCTCTGCCCCCACCCCTCTCCAGGCCCCTGCTTCTGCCCTGTTT
GCCACAGCTGTCTCTCTCAGGGCCGGGAGCACCAGGATGGGGAGGAGTTT
GAGGGACCAGCAGGCAGCTGTGAGTGGTGTCGCTGTCAGGCTGGCCAGGT
CAGCTGTGTGCGGCTGCAGTGCCCACCCCTTCCCTGCAAGCTCCAGGTCA
CCGAGCGGGGGAGCTGCTGCCCTCGCTGCAGAGGCTGCCTGGCTCATGGG
GAAGAGCACCCCGAAGGCAGTAGATGGGTGCCCCCCGACAGTGCCTGCTC
CTCCTGTGTGTGTCACGAGGGCGTCGTCACCTGTGCACGCATCCAGTGCA
TCAGCTCTTGCGCCCAGCCCCGCCAAGGGCCCCATGACTGCTGTCCTCAA
TGCTCTGACTGTGAGCATGAGGGCCGGAAGTACGAGCCTGGGGAGAGCTT
CCAGCCTGGGGCAGACCCCTGTGAAGTGTGCATCTGCGAGCCACAGCCTG
AGGGGCCTCCCAGCCTTCGCTGTCACCGGCGGCAGTGTCCCAGCCTGGTG
GGCTGCCCCCCCAGCCAGCTCCTGCCCCCTGGGCCCCAGCACTGCTGTCC
CACCTGTGCCGAGGCCTTGAGTAACTGTTCAGAGGGCCTGCTGGGATCTG
AGCTAGCCCCACCAGACCCCTGCTACACGTGCCAGTGCCAGGACCTGACA
TGGCTCTGCATCCACCAGGCTTGTCCTGAGCTCAGCTGTCCCCTCTCAGA
GCGCCACACTCCCCCTGGGAGCTGCTGCCCCGTATGCCGGGCTCCCACCC
AGTCCTGCGTGCACCAGGGCCGTGAGGTGGCCTCTGGAGAGCGCTGGACT
GTGGACACCTGCACCAGCTGCTCCTGCATGGCGGGCACCGTGCGTTGCCA
GAGCCAGCGCTGCTCACCGCTCTCGTGTGGCCCCGACAAGGCCCCTGCCC
TGAGTCCTGGCAGCTGCTGCCCCCGCTGCCTGCCTCGGCCCGCTTCCTGC
ATGGCCTTCGGAGACCCCCATTACCGCACCTTCGACGGCCGCCTGCTGCA
CTTCCAGGGCAGTTGCAGCTATGTGCTGGCCAAGGACTGCCACAGCGGGG
ACTTCAGTGTGCACGTGACCAATGATGACCGGGGCCGGAGCGGTGTGGCC
TGGACCCAGGAGGTGGCGGTGCTGCTGGGAGACATGGCCGTGCGGCTGCT
GCAGGACGGGGCAGTCACGGTGGATGGGCACCCGGTGGCCTTGCCCTTCC
TGCAGGAGCCGCTGCTGTATGTGGAGCTGCGAGGACACACTGTGATCCTG
CACGCCCAGCCCGGGCTCCAGGTGCTGTGGGATGGGCAGTCCCAGGTGGA
GGTGAGCGTACCTGGCTCCTACCAGGGCCGGACTTGTGGGCTCTGTGGGA
ACTTCAATGGCTTTGCCCAGGACGATCTGCAGGGCCCTGAGGGGCTGCTC
CTGCCCTCGGAGGCTGCGTTTGGGAATAGCTGGCAGGTCTCAGAGGGGCT
GTGGCCTGGCCGGCCCTGTTCTGCAGGCCGAGAGGTGGATCCGTGCCGGG
CAGCAGGTTACCGTGCCAGGCGTGAGGCCAATGCCCGGTGTGGGGTGCTG
AAGTCCTCCCCATTCAGTCGCTGCCATGCTGTGGTGCCACCGGAGCCCTT
CTTTGCCGCCTGTGTGTATGACCTGTGTGCCTGTGGCCCTGGCTCCTCCG
CTGATGCCTGCCTCTGTGATGCCCTGGAAGCCTACGCCAGTCACTGTCGC
CAGGCAGGAGTGACACCTACCTGGCGAGGCCCCACGCTGTGTGTGGTAGG
CTGCCCCCTGGAGCGTGGCTTCGTGTTTGATGAGTGCGGCCCACCCTGTC
CCCGCACCTGCTTCAATCAGCATATCCCCCTGGGGGAGCTGGCAGCCCAC
TGCGTGAGGCCCTGCGTGCCCGGCTGCCAGTGCCCTGCAGGCCTGGTGGA
GCATGAGGCCCACTGCATCCCACCCGAGGCCTGCCCCCAAGTCCTGCTCA
CTGGAGACCAGCCACTTGGTGCTCGGCCCAGCCCCAGCCGGGAGCCCCAG
GAGACACCC

[0523] A nucleic acid sequence encoding a processed human CRIM2 isoform 1 is shown below (SEQ ID NO: 544):

(SEQ ID NO: 544)

GGGGCTGTCCCCAGGGAGCCCCCTGGGCAGCAGACAACTGCCCATTCCTC
AGTCCTTGCTGGGAACTCCCAGGAGCAGTGGCACCCCCTGCGAGAGTGGC
TGGGGCGACTGGAGGCTGCAGTGATGGAGCTCAGAGAACAGAATAAGGAC
CTGCAGACGAGGGTGAGGCAGCTGGAGTCCTGTGAGTGCCACCCTGCATC
TCCCCAGTGCTGGGGGCTGGGGCGTGCCTGGCCCGAGGGGGCACGCTGGG
AGCCTGACGCCTGCACAGCCTGCGTCTGCCAGGATGGGGCCGCTCACTGT
GGCCCCCAAGCACACCTGCCCCATTGCAGGGGCTGCAGCCAAAATGGCCA
GACCTACGGCAACGGGGAGACCTTCTCCCCAGATGCCTGCACCACCTGCC
GCTGTCTGACAGGAGCCGTGCAGTGCCAGGGGCCCTCGTGTTCAGAGCTC
AACTGCTTGGAGAGCTGCACCCCACCTGGGGAGTGCTGCCCCATCTGCTG
CACAGAAGGTGGCTCTCACTGGGAACATGGCCAAGAGTGGACAACACCTG
GGGACCCCTGCCGAATCTGCCGGTGCCTGGAGGGTCACATCCAGTGCCGC
CAGCGAGAATGTGCCAGCCTGTGTCCATACCCAGCCCGGCCCCTCCCAGG
CACCTGCTGCCCTGTGTGTGATGGCTGTTTCCTAAACGGGCGGGAGCACC
GCAGCGGGGAGCCTGTGGGCTCAGGGGACCCCTGCTCGCACTGCCGCTGT
GCTAATGGGAGTGTCCAGTGTGAGCCTCTGCCCTGCCCGCCAGTGCCCTG
CAGACACCCAGGCAAGATCCCTGGGCAGTGCTGCCCTGTCTGCGATGGCT
GTGAGTACCAGGGACACCAGTATCAGAGCCAGGAGACCTTCAGACTCCAA
GAGCGGGGCCTCTGTGTCCGCTGCTCCTGCCAGGCTGGCGAGGTCTCCTG
TGAGGAGCAGGAGTGCCCAGTCACCCCCTGTGCCCTGCCTGCCTCTGGCC
GCCAGCTCTGCCCAGCCTGTGAGCTGGATGGAGAGGAGTTTGCTGAGGGA
GTCCAGTGGGAGCCTGATGGTCGGCCCTGCACCGCCTGCGTCTGTCAAGA
TGGGGTACCCAAGTGCGGGGCTGTGCTCTGCCCCCCAGCCCCCTGCCAGC
ACCCCACCCAGCCCCCTGGTGCCTGCTGCCCCAGCTGTGACAGCTGCACC
TACCACAGCCAAGTGTATGCCAATGGGCAGAACTTCACGGATGCAGACAG
CCCTTGCCATGCCTGCCACTGTCAGGATGGAACTGTGACATGCTCCTTGG
TTGACTGCCCTCCCACGACCTGTGCCAGGCCCCAGAGTGGACCAGGCCAG
TGTTGCCCCAGGTGCCCAGACTGCATCCTGGAGGAAGAGGTGTTTGTGGA
CGGCGAGAGCTTCTCCCACCCCCGAGACCCCTGCCAGGAGTGCCGATGCC
AGGAAGGCCATGCCCACTGCCAGCCTCGCCCCTGCCCCAGGGCCCCCTGT
GCCCACCCGCTGCCTGGGACCTGCTGCCCGAACGACTGCAGCGGCTGTGC
CTTTGGCGGGAAAGAGTACCCCAGCGGAGCGGACTTCCCCCACCCCTCTG
ACCCCTGCCGTCTGTGTCGCTGTCTGAGCGGCAACGTGCAGTGCCTGGCC
CGCCGCTGCGTGCCGCTGCCCTGTCCAGAGCCTGTCCTGCTGCCGGGAGA
GTGCTGCCCGCAGTGCCCAGCCCCCGCCGGCTGCCCACGGCCCGGCGCGG
CCCACGCCCGCCACCAGGAGTACTTCTCCCCGCCCGGCGATCCCTGCCGC
CGCTGCCTCTGCCTCGACGGCTCCGTGTCCTGCCAGCGGCTGCCCTGCCC
GCCCGCGCCCTGCGCGCACCCGCGCCAGGGGCCTTGCTGCCCCTCCTGCG
ACGGCTGCCTGTACCAGGGGAAGGAGTTTGCCAGCGGGGAGCGCTTCCCA
TCGCCCACTGCTGCCTGCCACCTCTGCCTTTGCTGGGAGGGCAGCGTGAG
CTGCGAGCCCAAGGCATGTGCCCCTGCACTGTGCCCCTTCCCTGCCAGGG
GCGACTGCTGCCCTGACTGTGATGGCTGTGAGTACCTGGGGGAGTCCTAC
CTGAGTAACCAGGAGTTCCCAGACCCCCGAGAACCCTGCAACCTGTGTAC
CTGTCTTGGAGGCTTCGTGACCTGCGGCCGCCGGCCCTGTGAGCCTCCGG
GCTGCAGCCACCCACTCATCCCCTCTGGGCACTGCTGCCCGACCTGCCAG
GGATGCCGCTACCATGGCGTCACTACTGCCTCCGGAGAGACCCTTCCTGA
CCCACTTGACCCTACCTGCTCCCTCTGCACCTGCCAGGAAGGTTCCATGC
GCTGCCAGAAGAAGCCATGTCCCCCAGCTCTCTGCCCCCACCCCTCTCCA
GGCCCCTGCTTCTGCCCTGTTTGCCACAGCTGTCTCTCTCAGGGCCGGGA
GCACCAGGATGGGGAGGAGTTTGAGGGACCAGCAGGCAGCTGTGAGTGGT
GTCGCTGTCAGGCTGGCCAGGTCAGCTGTGTGCGGCTGCAGTGCCCACCC
CTTCCCTGCAAGCTCCAGGTCACCGAGCGGGGGAGCTGCTGCCCTCGCTG
CAGAGGCTGCCTGGCTCATGGGGAAGAGCACCCCGAAGGCAGTAGATGGG
TGCCCCCCGACAGTGCCTGCTCCTCCTGTGTGTGTCACGAGGGCGTCGTC
ACCTGTGCACGCATCCAGTGCATCAGCTCTTGCGCCCAGCCCCGCCAAGG
GCCCCATGACTGCTGTCCTCAATGCTCTGACTGTGAGCATGAGGGCCGGA
AGTACGAGCCTGGGGAGAGCTTCCAGCCTGGGGCAGACCCCTGTGAAGTG
TGCATCTGCGAGCCACAGCCTGAGGGGCCTCCCAGCCTTCGCTGTCACCG
GCGGCAGTGTCCCAGCCTGGTGGGCTGCCCCCCCAGCCAGCTCCTGCCCC
CTGGGCCCCAGCACTGCTGTCCCACCTGTGCCGAGGCCTTGAGTAACTGT
TCAGAGGGCCTGCTGGGATCTGAGCTAGCCCCACCAGACCCCTGCTACAC
GTGCCAGTGCCAGGACCTGACATGGCTCTGCATCCACCAGGCTTGTCCTG
AGCTCAGCTGTCCCCTCTCAGAGCGCCACACTCCCCCTGGGAGCTGCTGC
CCCGTATGCCGGGCTCCCACCCAGTCCTGCGTGCACCAGGGCCGTGAGGT
GGCCTCTGGAGAGCGCTGGACTGTGGACACCTGCACCAGCTGCTCCTGCA
TGGCGGGCACCGTGCGTTGCCAGAGCCAGCGCTGCTCACCGCTCTCGTGT
GGCCCCGACAAGGCCCCTGCCCTGAGTCCTGGCAGCTGCTGCCCCCGCTG
CCTGCCTCGGCCCGCTTCCTGCATGGCCTTCGGAGACCCCCATTACCGCA
CCTTCGACGGCCGCCTGCTGCACTTCCAGGGCAGTTGCAGCTATGTGCTG
GCCAAGGACTGCCACAGCGGGGACTTCAGTGTGCACGTGACCAATGATGA
CCGGGGCCGGAGCGGTGTGGCCTGGACCCAGGAGGTGGCGGTGCTGCTGG
GAGACATGGCCGTGCGGCTGCTGCAGGACGGGGCAGTCACGGTGGATGGG
CACCCGGTGGCCTTGCCCTTCCTGCAGGAGCCGCTGCTGTATGTGGAGCT
GCGAGGACACACTGTGATCCTGCACGCCCAGCCCGGGCTCCAGGTGCTGT
GGGATGGGCAGTCCCAGGTGGAGGTGAGCGTACCTGGCTCCTACCAGGGC
CGGACTTGTGGGCTCTGTGGGAACTTCAATGGCTTTGCCCAGGACGATCT
GCAGGGCCCTGAGGGGCTGCTCCTGCCCTCGGAGGCTGCGTTTGGGAATA
GCTGGCAGGTCTCAGAGGGGCTGTGGCCTGGCCGGCCCTGTTCTGCAGGC
CGAGAGGTGGATCCGTGCCGGGCAGCAGGTTACCGTGCCAGGCGTGAGGC
CAATGCCCGGTGTGGGGTGCTGAAGTCCTCCCCATTCAGTCGCTGCCATG
CTGTGGTGCCACCGGAGCCCTTCTTTGCCGCCTGTGTGTATGACCTGTGT
GCCTGTGGCCCTGGCTCCTCCGCTGATGCCTGCCTCTGTGATGCCCTGGA
AGCCTACGCCAGTCACTGTCGCCAGGCAGGAGTGACACCTACCTGGCGAG
GCCCCACGCTGTGTGTGGTAGGCTGCCCCCTGGAGCGTGGCTTCGTGTTT
GATGAGTGCGGCCCACCCTGTCCCCGCACCTGCTTCAATCAGCATATCCC
CCTGGGGGAGCTGGCAGCCCACTGCGTGAGGCCCTGCGTGCCCGGCTGCC
AGTGCCCTGCAGGCCTGGTGGAGCATGAGGCCCACTGCATCCCACCCGAG
GCCTGCCCCCAAGTCCTGCTCACTGGAGACCAGCCACTTGGTGCTCGGCC
CAGCCCCAGCCGGGAGCCCCAGGAGACACCC

[0524] A human CRIM2 isoform 2 precursor protein sequence (NCBI Ref Seq NP_955381.2) is as follows:

| (SEQ ID NO: 545) | |
|---|---|
| 1 | MAGVGAAALS LLLHLGALAL AAGAEGGAVP REPPGQQTTA HSSVLAGNSQ EQWHPLREWL |
| 61 | GRLEAAVMEL REQNKDLQTR VRQLESCECH PASPQCWGLG RAWPEGARWE PDACTACVCQ |
| 121 | DGAAHCGPQA HLPHCRGCSQ NGQTYGNGET FSPDACTTCR CLEGTITCNQ KPCPRGPCPE |
| 181 | PGACCPHCKP GCDYEGQLYE EGVTFLSSSN PCLQCTCLRS RVRCMALKCP PSPCPEPVLR |
| 241 | PGHCCPTCQG CTEGGSHWEH GQEWTTPGDP CRICRCLEGH IQCRQRECAS LCPYPARPLP |
| 301 | GTCCPVCDGC FLNGREHRSG EPVGSGDPCS HCRCANGSVQ CEPLPCPPVP CRHPGKIPGQ |
| 361 | CCPVCDGCEY QGHQYQSQET FRLQERGLCV RCSCQAGEVS CEEQECPVTP CALPASGRQL |
| 421 | CPACELDGEE FAEGVQWEPD GRPCTACVCQ DGVPKCGAVL CPPAPCQHPT QPPGACCPSC |
| 481 | DSCTYHSQVY ANGQNFTDAD SPCHACHCQD GTVTCSLVDC PPTTCARPQS GPGQCCPRCP |
| 541 | DCILEEEVFV DGESFSHPRD PCQECRCQEG HAHCQPRPCP RAPCAHPLPG TCCPNDCSGC |
| 601 | AFGGKEYPSG ADFPHPSDPC RLCRCLSGNV QCLARRCVPL PCPEPVLLPG ECCPQCPAAP |
| 661 | APAGCPRPGA AHARHQEYFS PPGDPCRRCL CLDGSVSCQR LPCPPAPCAH PRQGPCCPSC |
| 721 | DGCLYQGKEF ASGERFPSPT AACHLCLCWE GSVSCEPKAC APALCPFPAR GDCCPDCDGE |
| 781 | GHGIGSCRGG MRETRGLGQN NLYCPRVDLK YLLQ |

[0525] A processed CRIM2 isoform 2 sequence is as follows:

(SEQ ID NO: 546)

AEGGAVPREPPGQQTTAHSSVLAGNSQEQWHPLREWLGRLEAAVMELREQ
NKDLQTRVRQLESCECHPASPQCWGLGRAWPEGARWEPDACTACVCQDGA
AHCGPQAHLPHCRGCSQNGQTYGNGETFSPDACTTCRCLEGTITCNQKPC
PRGPCPEPGACCPHCKPGCDYEGQLYEEGVTFLSSSNPCLQCTCLRSRVR
CMALKCPPSPCPEPVLRPGHCCPTCQGCTEGGSHWEHGQEWTTPGDPCRI
CRCLEGHIQCRQRECASLCPYPARPLPGTCCPVCDGCFLNGREHRSGEPV
GSGDPCSHCRCANGSVQCEPLPCPPVPCRHPGKIPGQCCPVCDGCEYQGH
QYQSQETFRLQERGLCVRCSCQAGEVSCEEQECPVTPCALPASGRQLCPA
CELDGEEFAEGVQWEPDGRPCTACVCQDGVPKCGAVLCPPAPCQHPTQPP
GACCPSCDSCTYHSQVYANGQNFTDADSPCHACHCQDGTVTCSLVDCPPT
TCARPQSGPGQCCPRCPDCILEEEVFVDGESFSHPRDPCQECRCQEGHAH
CQPRPCPRAPCAHPLPGTCCPNDCSGCAFGGKEYPSGADFPHPSDPCRLC
RCLSGNVQCLARRCVPLPCPEPVLLPGECCPQCPAAPAPAGCPRPGAAHA
RHQEYFSPPGDPCRRCLCLDGSVSCQRLPCPPAPCAHPRQGPCCPSCDGC
LYQGKEFASGERFPSPTAACHLCLCWEGSVSCEPKACAPALCPFPARGDC
CPDCDGEGHGIGSCRGGMRETRGLGQNNLYCPRVDLKYLLQ

[0526] A nucleic acid sequence encoding an unprocessed human CRIM2 isoform 2 precursor protein is shown below (SEQ ID NO: 547), corresponding to nucleotides 44-2485 of NCBI Reference Sequence NM_199349.2. The signal sequence is underlined.

(SEQ ID NO: 547)

ATGGCCGGGGTCGGGGCCGCTGCGCTGTCCCTTCTCCTGCACCTCGGGGC
CCTGGCGCTGGCCGCGGGCGCGGAAGGTGGGGCTGTCCCCAGGGAGCCCC
CTGGGCAGCAGACAACTGCCCATTCCTCAGTCCTTGCTGGGAACTCCCAG
GAGCAGTGGCACCCCCTGCGAGAGTGGCTGGGGCGACTGGAGGCTGCAGT
GATGGAGCTCAGAGAACAGAATAAGGACCTGCAGACGAGGGTGAGGCAGC
TGGAGTCCTGTGAGTGCCACCCTGCATCTCCCCAGTGCTGGGGGCTGGGG
CGTGCCTGGCCCGAGGGGGCACGCTGGGAGCCTGACGCCTGCACAGCCTG
CGTCTGCCAGGATGGGGCCGCTCACTGTGGCCCCCAAGCACACCTGCCCC
ATTGCAGGGGCTGCAGCCAAAATGGCCAGACCTACGGCAACGGGGAGACC
TTCTCCCCAGATGCCTGCACCACCTGCCGCTGTCTGGAAGGTACCATCAC
TTGCAACCAGAAGCCATGCCCAAGAGGACCCTGCCCTGAGCCAGGAGCAT
GCTGCCCGCACTGTAAGCCAGGCTGTGATTATGAGGGGCAGCTTTATGAG
GAGGGGGTCACCTTCCTGTCCAGCTCCAACCCTTGTCTACAGTGCACCTG
CCTGAGGAGCCGAGTTCGCTGCATGGCCCTGAAGTGCCCGCCTAGCCCCT
GCCCAGAGCCAGTGCTGAGGCCTGGGCACTGCTGCCCAACCTGCCAAGGC
TGCACAGAAGGTGGCTCTCACTGGGAACATGGCCAAGAGTGGACAACACC
TGGGGACCCCTGCCGAATCTGCCGGTGCCTGGAGGGTCACATCCAGTGCC
GCCAGCGAGAATGTGCCAGCCTGTGTCCATACCCAGCCCGGCCCCTCCCA
GGCACCTGCTGCCCTGTGTGTGATGGCTGTTTCCTAAACGGGCGGGAGCA
CCGCAGCGGGGAGCCTGTGGGCTCAGGGGACCCCTGCTCGCACTGCCGCT
GTGCTAATGGGAGTGTCCAGTGTGAGCCTCTGCCCTGCCCGCCAGTGCCC
TGCAGACACCCAGGCAAGATCCCTGGGCAGTGCTGCCCTGTCTGCGATGG
CTGTGAGTACCAGGGACACCAGTATCAGAGCCAGGAGACCTTCAGACTCC
AAGAGCGGGGCCTCTGTGTCCGCTGCTCCTGCCAGGCTGGCGAGGTCTCC
TGTGAGGAGCAGGAGTGCCCAGTCACCCCCTGTGCCCTGCCTGCCTCTGG
CCGCCAGCTCTGCCCAGCCTGTGAGCTGGATGGAGAGGAGTTTGCTGAGG
GAGTCCAGTGGGAGCCTGATGGTCGGCCCTGCACCGCCTGCGTCTGTCAA
GATGGGGTACCCAAGTGCGGGGCTGTGCTCTGCCCCCCAGCCCCCTGCCA
GCACCCCACCCAGCCCCCTGGTGCCTGCTGCCCCAGCTGTGACAGCTGCA
CCTACCACAGCCAAGTGTATGCCAATGGGCAGAACTTCACGGATGCAGAC
AGCCCTTGCCATGCCTGCCACTGTCAGGATGGAACTGTGACATGCTCCTT
GGTTGACTGCCCTCCCACGACCTGTGCCAGGCCCCAGAGTGGACCAGGCC
AGTGTTGCCCCAGGTGCCCAGACTGCATCCTGGAGGAAGAGGTGTTTGTG
GACGGCGAGAGCTTCTCCCACCCCCGAGACCCCTGCCAGGAGTGCCGATG
CCAGGAAGGCCATGCCCACTGCCAGCCTCGCCCCTGCCCCAGGGCCCCCT
GTGCCCACCCGCTGCCTGGGACCTGCTGCCCGAACGACTGCAGCGGCTGT
GCCTTTGGCGGGAAAGAGTACCCCAGCGGAGCGGACTTCCCCCACCCCTC
TGACCCCTGCCGTCTGTGTCGCTGTCTGAGCGGCAACGTGCAGTGCCTGG
CCCGCCGCTGCGTGCCGCTGCCCTGTCCAGAGCCTGTCCTGCTGCCGGGA
GAGTGCTGCCCGCAGTGCCCAGCCGCCCCAGCCCCCGCCGGCTGCCCACG
GCCCGGCGCGGCCCACGCCCGCCACCAGGAGTACTTCTCCCCGCCCGGCG
ATCCCTGCCGCCGCTGCCTCTGCCTCGACGGCTCCGTGTCCTGCCAGCGG
CTGCCCTGCCCGCCCGCGCCCTGCGCGCACCCGCGCCAGGGGCCTTGCTG
CCCCTCCTGCGACGGCTGCCTGTACCAGGGGAAGGAGTTTGCCAGCGGGG
AGCGCTTCCCATCGCCCACTGCTGCCTGCCACCTCTGCCTTTGCTGGGAG
GGCAGCGTGAGCTGCGAGCCCAAGGCATGTGCCCCTGCACTGTGCCCCTT
CCCTGCCAGGGGCGACTGCTGCCCTGACTGTGATGGTGAGGGTCATGGGA
TAGGGAGCTGCCGGGGTGGGATGCGGGAGACCAGAGGGCTGGGTCAGAAT
AATCTTTACTGCCCTAGGGTGGATCTAAAATATTTATTACAG

[0527] A nucleic acid sequence encoding a processed CRIM2 isoform 2 is shown below (SEQ ID NO: 548):

(SEQ ID NO: 548)

GCGGAAGGTGGGGCTGTCCCCAGGGAGCCCCCTGGGCAGCAGACAACTGC
CCATTCCTCAGTCCTTGCTGGGAACTCCCAGGAGCAGTGGCACCCCCTGC
GAGAGTGGCTGGGGCGACTGGAGGCTGCAGTGATGGAGCTCAGAGAACAG
AATAAGGACCTGCAGACGAGGGTGAGGCAGCTGGAGTCCTGTGAGTGCCA
CCCTGCATCTCCCCAGTGCTGGGGGCTGGGGCGTGCCTGGCCCGAGGGGG
CACGCTGGGAGCCTGACGCCTGCACAGCCTGCGTCTGCCAGGATGGGGCC
GCTCACTGTGGCCCCCAAGCACACCTGCCCCATTGCAGGGGCTGCAGCCA
AAATGGCCAGACCTACGGCAACGGGGAGACCTTCTCCCCAGATGCCTGCA
CCACCTGCCGCTGTCTGGAAGGTACCATCACTTGCAACCAGAAGCCATGC
CCAAGAGGACCCTGCCCTGAGCCAGGAGCATGCTGCCCGCACTGTAAGCC
AGGCTGTGATTATGAGGGGCAGCTTTATGAGGAGGGGGTCACCTTCCTGT
CCAGCTCCAACCCTTGTCTACAGTGCACCTGCCTGAGGAGCCGAGTTCGC
TGCATGGCCCTGAAGTGCCCGCCTAGCCCCTGCCCAGAGCCAGTGCTGAG
GCCTGGGCACTGCTGCCCAACCTGCCAAGGCTGCACAGAAGGTGGCTCTC
ACTGGGAACATGGCCAAGAGTGGACAACACCTGGGGACCCCTGCCGAATC
TGCCGGTGCCTGGAGGGTCACATCCAGTGCCGCCAGCGAGAATGTGCCAG
CCTGTGTCCATACCCAGCCCGGCCCCTCCCAGGCACCTGCTGCCCTGTGT
GTGATGGCTGTTTCCTAAACGGGCGGGAGCACCGCAGCGGGGAGCCTGTG
GGCTCAGGGGACCCCTGCTCGCACTGCCGCTGTGCTAATGGGAGTGTCCA
GTGTGAGCCTCTGCCCTGCCCGCCAGTGCCCTGCAGACACCCAGGCAAGA
TCCCTGGGCAGTGCTGCCCTGTCTGCGATGGCTGTGAGTACCAGGGACAC
CAGTATCAGAGCCAGGAGACCTTCAGACTCCAAGAGCGGGGCCTCTGTGT
CCGCTGCTCCTGCCAGGCTGGCGAGGTCTCCTGTGAGGAGCAGGAGTGCC
CAGTCACCCCCTGTGCCCTGCCTGCCTCTGGCCGCCAGCTCTGCCCAGCC
TGTGAGCTGGATGGAGAGGAGTTTGCTGAGGGAGTCCAGTGGGAGCCTGA
TGGTCGGCCCTGCACCGCCTGCGTCTGTCAAGATGGGGTACCCAAGTGCG
GGGCTGTGCTCTGCCCCCCAGCCCCCTGCCAGCACCCCACCCAGCCCCCT
GGTGCCTGCTGCCCCAGCTGTGACAGCTGCACCTACCACAGCCAAGTGTA
TGCCAATGGGCAGAACTTCACGGATGCAGACAGCCCTTGCCATGCCTGCC
ACTGTCAGGATGGAACTGTGACATGCTCCTTGGTTGACTGCCCTCCCACG
ACCTGTGCCAGGCCCCAGAGTGGACCAGGCCAGTGTTGCCCCAGGTGCCC
AGACTGCATCCTGGAGGAAGAGGTGTTTGTGGACGGCGAGAGCTTCTCCC
ACCCCCGAGACCCCTGCCAGGAGTGCCGATGCCAGGAAGGCCATGCCCAC
TGCCAGCCTCGCCCCTGCCCCAGGGCCCCCTGTGCCCACCCGCTGCCTGG
GACCTGCTGCCCGAACGACTGCAGCGGCTGTGCCTTTGGCGGGAAAGAGT
ACCCCAGCGGAGCGGACTTCCCCCACCCCTCTGACCCCTGCCGTCTGTGT
CGCTGTCTGAGCGGCAACGTGCAGTGCCTGGCCCGCCGCTGCGTGCCGCT
GCCCTGTCCAGAGCCTGTCCTGCTGCCGGGAGAGTGCTGCCCGCAGTGCC
CAGCCGCCCCAGCCCCCGCCGGCTGCCCACGGCCCGGCGCGGCCCACGCC
CGCCACCAGGAGTACTTCTCCCCGCCCGGCGATCCCTGCCGCCGCTGCCT
CTGCCTCGACGGCTCCGTGTCCTGCCAGCGGCTGCCCTGCCCGCCCGCGC
CCTGCGCGCACCCGCGCCAGGGGCCTTGCTGCCCCTCCTGCGACGGCTGC
CTGTACCAGGGGAAGGAGTTTGCCAGCGGGGAGCGCTTCCCATCGCCCAC
TGCTGCCTGCCACCTCTGCCTTTGCTGGGAGGGCAGCGTGAGCTGCGAGC
CCAAGGCATGTGCCCCTGCACTGTGCCCCTTCCCTGCCAGGGGCGACTGC
TGCCCTGACTGTGATGGTGAGGGTCATGGGATAGGGAGCTGCCGGGGTGG
GATGCGGGAGACCAGAGGGCTGGGTCAGAATAATCTTTACTGCCCTAGGG
TGGATCTAAAATATTTATTACAG

[0528] In certain embodiments, the disclosure relates to heteromultimers that comprise at least one CRIM2 polypeptide, which includes fragments, functional variants, and modified forms thereof. Preferably, CRIM2 polypeptides for use in accordance with the disclosure (e.g., heteromultimers comprising a CRIM2 polypeptide and uses thereof) are soluble (e.g., an extracellular domain of CRIM2). In other preferred embodiments, CRIM2 polypeptides for use in accordance with the disclosure bind to and/or inhibit (antagonize) activity (e.g., Smad signaling) of one or more TGF-beta superfamily ligands. In some embodiments, heteromultimers of the disclosure at least one CRIM2 polypeptide that is at least 70%, 75%, 80%, 85%, 90%, 91%, 92%, 93%, 94%, 95%, 96%, 97%, 98%, 99%, or 100% identical to the amino acid sequence of SEQ ID NOs: 541, 542, 545, or 546. In some embodiments, heteromultimers of the disclosure comprise at least one CRIM2 polypeptide that is at least 70%, 75%, 80%, 85%, 90%, 91%, 92%, 93%, 94%, 95%, 96%, 97%, 98%, 99%, or 100% identical to a polypeptide that begins at any one of amino acids of 26-138 (e.g., amino acid residues 26, 27, 28, 29, 30, 31, 32, 33, 34, 35, 36, 37, 38, 39, 40, 41, 42, 43, 44, 45, 46, 47, 48, 49, 50, 51, 52, 53, 54, 55, 56, 57, 58, 59, 60, 61, 62, 63, 64, 65, 66, 67, 68, 69, 70, 71, 72, 73, 74, 75, 76, 77, 78, 79, 80, 81, 82, 83, 84, 85, 86, 87, 88, 89, 90, 91, 92, 93, 94, 95, 96, 97, 98, 99, 100, 101, 102, 103, 104, 105, 106, 107, 108, 109, 110, 111, 112, 113, 114, 115, 116, 117, 118, 119, 120, 121, 122, 123, 124, 125, 126, 127, 128, 129, 130, 131, 132, 133, 134, 135, 136, 137, and 138) of SEQ ID NO: 541, and ends at any one of amino acids 1298-1503 (e.g., amino acid residues 1298, 1299, 1300, 1301, 1302, 1303, 1304, 1305, 1306, 1307, 1308, 1309, 1310, 1311, 1312, 1313, 1314, 1315, 1316, 1317, 1318, 1319, 1320, 1321, 1322, 1323, 1324, 1325, 1326, 1327, 1328, 1329, 1330, 1331, 1332, 1333, 1334, 1335, 1335, 1336, 1337, 1338, 1339, 1340, 1341, 1342, 1343, 1344, 1345, 1346, 1347, 1348, 1349, 1350, 1351, 1352, 1353, 1354, 1355, 1356, 1357, 1358, 1359, 1360, 1361, 1362, 1363, 1364, 1365, 1366, 1367, 1368, 1369, 1370, 1371, 1372, 1373, 1374, 1375, 1376, 1377, 1378, 1379, 1380, 1381, 1382, 1383, 1384, 1385, 1386, 1387, 1388, 1389, 1390, 1391, 1392, 1393, 1394, 1395, 1396, 1397, 1398, 1399, 1400, 1401, 1402, 1403, 1404, 1405, 1406, 1407, 1408, 1409, 1410, 1411, 1412, 1413, 1414, 1415, 1416, 1417, 1418, 1419, 1420, 1421, 1422, 1423, 1424, 1425, 1426, 1427, 1428, 1429, 1430, 1431, 1432, 1433, 1434, 1435, 1435, 1436, 1437, 1438, 1439, 1440, 1441, 1442, 1443, 1444, 1445, 1446, 1447, 1448, 1349, 1450, 1451, 1452, 1453, 1454, 1455, 1456, 1457, 1458, 1459, 1460, 1461, 1462, 1463, 1464, 1465, 1466, 1467, 1468, 1469, 1470, 1471, 1472, 1473, 1474, 1475, 1476, 1477, 1478, 1479, 1480, 1481, 1482, 1483, 1484, 1485, 1486, 1487, 1488, 1489, 1490, 1491, 1492, 1493, 1494, 1495, 1496, 1497, 1498, 1499, 1500, 1501, 1502, or 1503) of SEQ ID NO: 541. In some embodiments, heteromultimers of the disclosure comprise at least one CRIM2 polypeptide that is at least 70%, 75%, 80%, 85%, 90%, 91%, 92%, 93%, 94%, 95%, 96%, 97%, 98%, 99%, or 100% identical to amino acids of 26-1298 of SEQ ID NO: 541. In some embodiments, heteromultimers of the disclosure comprise at least one CRIM2 polypeptide that is at least 70%, 75%, 80%, 85%, 90%, 91%, 92%, 93%, 94%, 95%, 96%, 97%, 98%, 99%, or 100% identical to amino acids of 26-1503 of SEQ ID NO: 541. In some embodiments, heteromultimers of the disclosure comprise at least one CRIM2 polypeptide that is at least 70%, 75%, 80%, 85%, 90%, 91%, 92%, 93%, 94%, 95%, 96%, 97%, 98%, 99%, or 100% identical to amino acids of 138-1298 of SEQ ID NO: 541. In some embodiments, heteromultimers of the disclosure comprise at least one CRIM2 polypeptide that is at least 70%, 75%, 80%, 85%, 90%, 91%, 92%, 93%, 94%, 95%, 96%, 97%, 98%, 99%, or 100% identical to amino acids of 138-1503 of SEQ ID NO: 541. In some embodiments, heteromultimers of the disclosure comprise at least one CRIM2 polypeptide that is at least 70%, 75%, 80%, 85%, 90%, 91%, 92%, 93%, 94%, 95%, 96%, 97%, 98%, 99%, or 100% identical to a polypeptide that begins at any one of amino acids of 24-138 (e.g., amino acid residues 24, 25, 26, 27, 28, 29, 30, 31, 32, 33, 34, 35, 36, 37, 38, 39, 40, 41, 42, 43, 44, 45, 46, 47, 48, 49, 50, 51, 52, 53, 54, 55, 56, 57, 58, 59, 60, 61, 62, 63, 64, 65, 66, 67, 68, 69, 70, 71, 72, 73, 74, 75, 76, 77, 78, 79, 80, 81, 82, 83, 84, 85, 86, 87, 88, 89, 90, 91, 92, 93, 94, 95, 96, 97, 98, 99, 100, 101, 102, 103, 104, 105, 106, 107, 108, 109, 110, 111, 112, 113, 114, 115, 116, 117, 118, 119, 120, 121, 122, 123, 124, 125, 126, 127, 128, 129, 130, 131, 132, 133, 134, 135, 136, 137, or 138) of SEQ ID NO: 545, and ends at any one of amino acids 539-814 (e.g., amino acid residues 539, 540, 541, 542, 543, 544, 545, 546, 547, 548, 549, 550, 551, 552, 553, 554, 555, 556, 557, 558, 559, 560, 561, 562, 563, 564, 565, 566, 567, 568, 569, 570, 571, 572, 573, 574, 575, 576, 577, 578, 579, 580, 581, 582, 583, 584, 585, 586, 587, 588, 589, 590, 591, 592, 593, 594, 595, 596, 597, 598, 599, 600, 601, 602, 603, 604, 605, 606, 607, 608, 609, 610, 611, 612, 613, 414, 615, 616, 617, 618, 619, 620, 621, 622, 623, 624, 625, 626, 627, 628, 629, 630, 631, 632, 633, 634, 635, 635, 636, 637, 638, 639, 640, 641, 642, 643, 644, 645, 646, 647, 648, 649, 650, 651, 652, 653, 654, 655, 656, 657, 658, 659, 660, 661, 662, 663, 664, 665, 666, 667, 668, 669, 670, 671, 672, 673, 674, 675, 676, 677, 678, 679, 680, 681, 682, 683, 684, 685, 686, 687, 688, 689, 690, 691, 692, 693, 694, 695, 696, 697, 698, 699, 700, 701, 702, 703, 704, 405, 706, 707, 708, 709, 710, 711, 712, 713, 714, 715, 716, 717, 718, 719, 720, 721, 722, 723, 724, 725, 726, 727, 728, 729, 730, 731, 732, 733, 734, 735, 735, 736, 737, 738, 739, 740, 741, 742, 743, 744, 745, 746, 747, 748, 749, 750, 751, 752, 753, 754, 755, 756, 757, 758, 759, 760, 761, 762, 763, 764, 765, 766, 767, 768, 769, 770, 771, 772, 773, 774, 775, 776, 777, 778, 779, 780, 781, 782, 783, 784, 785, 786, 787, 788, 789, 790, 791, 792, 793, 794, 795, 796, 797, 798, 799, 800, 801, 802, 803, 804, 805, 806, 807, 808, 809, 810, 811, 812, 813, or 814) of SEQ ID NO: 545. In some embodiments, heteromultimers of the disclosure comprise at least one CRIM2 polypeptide that is at least 70%, 75%, 80%, 85%, 90%, 91%, 92%, 93%, 94%, 95%, 96%, 97%, 98%, 99%, or 100% identical to amino acids of 24-539 of SEQ ID NO: 545. In some embodiments, heteromultimers of the disclosure comprise at least one CRIM2 polypeptide that is at least 70%, 75%, 80%, 85%, 90%, 91%, 92%, 93%, 94%, 95%, 96%, 97%, 98%, 99%, or 100% identical to amino acids of 24-814 of SEQ ID NO: 545. In some embodiments, heteromultimers of the disclosure comprise at least one CRIM2 polypeptide that is at least 70%, 75%, 80%, 85%, 90%, 91%, 92%, 93%, 94%, 95%, 96%, 97%, 98%, 99%, or 100% identical to amino acids of 138-539 of SEQ ID NO: 545. In some embodiments, heteromultimers of the disclosure comprise at least one CRIM2 polypeptide that is at least 70%, 75%, 80%, 85%, 90%, 91%, 92%, 93%, 94%, 95%, 96%, 97%, 98%, 99%, or 100% identical to amino acids of 138-814 of SEQ ID NO: 545. In some embodiments, heteromultimers of the disclosure comprise at least one CRIM2 polypeptide that is at least 70%, 75%, 80%, 85%, 90%, 91%, 92%, 93%, 94%, 95%, 96%, 97%, 98%, 99%, or 100% identical to a polypeptide that begins at any one of amino acids of 27-87 (e.g., amino acid residues 27, 28, 29, 30, 31, 32, 33, 34, 35, 36, 37, 38, 39, 40, 41, 42, 43, 44, 45, 46, 47, 48, 49, 50, 51, 52, 53, 54, 55, 56, 57, 58, 59, 60, 61, 62, 63, 64, 65, 66, 67, 68, 69, 70, 71, 72, 73, 74, 75, 76, 77, 78, 79, 80, 81, 82, 83, 84, 85, 86, and 87) of SEQ ID NO: 541, and ends at any one of amino acids 1478-1503 (e.g., amino acid residues 1479, 1480, 1481, 1482, 1483, 1484, 1485, 1486, 1487, 1488, 1489, 1490, 1491, 1492, 1493, 1494, 1495, 1496, 1497, 1498, 1499, 1500, 1501, 1502, or 1503) of SEQ ID NO: 541. In some embodiments, heteromultimers of the disclosure comprise at least one CRIM2 polypeptide that is at least 70%, 75%, 80%, 85%, 90%, 91%, 92%, 93%, 94%, 95%, 96%, 97%, 98%, 99%, or 100% identical to amino acids of 27-1503 of SEQ ID NO: 541. In some embodiments, heteromultimers of the disclosure comprise at least one CRIM2 polypeptide that is at least 70%, 75%, 80%, 85%, 90%, 91%, 92%, 93%, 94%, 95%, 96%, 97%, 98%, 99%, or 100% identical to amino acids of 87-1478 of SEQ ID NO: 541. In some embodiments, heteromultimers of the disclosure comprise at least one CRIM2 polypeptide that is at least 70%, 75%, 80%, 85%, 90%, 91%, 92%, 93%, 94%, 95%, 96%, 97%, 98%, 99%, or 100% identical to a polypeptide that begins at any one of amino acids of 24-87 (e.g., amino acid residues 24, 25, 26, 27, 28, 29, 30, 31, 32, 33, 34, 35, 36, 37, 38, 39, 40, 41, 42, 43, 44, 45, 46, 47, 48, 49, 50, 51, 52, 53, 54, 55, 56, 57, 58, 59, 60, 61, 62, 63, 64, 65, 66, 67, 68, 69, 70, 71, 72, 73, 74, 75, 76, 77, 78, 79, 80, 81, 82, 83, 84, 85, 86, and 87) of SEQ ID NO: 545, and ends at any one of amino acids 804-814 (e.g., amino acid residues 804, 805, 806, 807, 808, 809, 810, 811, 812, 813, or 814) of SEQ ID NO: 545. In some embodiments, heteromultimers of the disclosure comprise at least one CRIM2 polypeptide that is at least 70%, 75%, 80%, 85%, 90%, 91%, 92%, 93%, 94%, 95%, 96%, 97%, 98%, 99%, or 100% identical to amino acids of 24-814 of SEQ ID NO: 545. In some embodiments, heteromultimers of the disclosure comprise at least one CRIM2 polypeptide that is at least 70%, 75%, 80%, 85%, 90%, 91%, 92%, 93%, 94%, 95%, 96%, 97%, 98%, 99%, or 100% identical to amino acids of 87-804 of SEQ ID NO: 545.

[0529] The term “BAMBI polypeptide” includes polypeptides comprising any naturally occurring BAMBI protein (encoded by BAMBI or one of its nonhuman orthologs) as well as any variants thereof (including mutants, fragments, fusions, and peptidomimetic forms) that retain a useful activity.

[0530] The human BAMBI precursor protein sequence (NCBI Ref Seq NP_036474.1) is as follows:

| | (SEQ ID NO: 549) |
|---|---|
| 1 | MDRHSSYIFI WLQLELCAMA VLLTKGEIRC YCDAAHCVAT GYMCKSELSA CFSRLLDPQN |
| 61 | SNSPLTHGCL DSLASTTDIC QAKQARNHSG TTIPTLECCH EDMCNYRGLH DVLSPPRGEA |
| 121 | [chemical structure] |
| 181 | KRLQDQRQQM LSRLHYSFHG HHSKKGQVAK LDLECMVPVS GHENCCLTCD KMRQADLSND |
| 241 | KILSLVHWGM YSGHGKLEFV |

[0531] The signal peptide is indicated by single underline, the extracellular domain is indicated in bold font, and the transmembrane domain is indicated by dotted underline.

[0532] A processed BAMBI polypeptide sequence is as follows:

(SEQ ID NO: 550)

VLLTKGEIRCYCDAAHCVATGYMCKSELSACFSRLLDPQNSNSPLTHGCL
DSLASTTDICQAKQARNHSGTTIPTLECCHEDMCNYRGLHDVLSPPRGEA
SGQGNRYQHDGSRNLITKVQELTSSKELWFRA

[0533] A nucleic acid sequence encoding unprocessed human BAMBI precursor protein is shown below (SEQ ID NO: 551), corresponding to nucleotides 404-1183 of NCBI Reference Sequence NM_012342.2. The signal sequence is indicated by solid underline and the transmembrane domain by dotted underline.

(SEQ ID NO: 551)
ATGGATCGCCACTCCAGCTACATCTTCATCTGGCTGCAGCTGGAGCTCTGCGCCATGGCCGTGCTGCTCACCAAA
GGTGAAATTCGATGCTACTGTGATGCTGCCCACTGTGTAGCCACTGGTTATATGTGTAAATCTGAGCTCAGCGCC
TGCTTCTCTAGACTTCTTGATCCTCAGAACTCAAATTCCCCACTCACCCATGGCTGCCTGGACTCTCTTGCAAGC
ACGACAGACATCTGCCAAGCCAAACAGGCCCGAAACCACTCTGGCACCACCATACCCACATTGGAATGCTGTCAT
GAAGACATGTGCAATTACAGAGGGCTGCACGATGTTCTCTCTCCTCCCAGGGGTGAGGCCTCAGGACAAGGAAAC
AGGTATCAGCATGATGGTAGCAGAAACCTTATCACCAAGGTGCAGGAGCTGACTTCTTCCAAAGAGTTGTGGTTC

[chemical structure]

CTTCGAAGTGAAAATAAGAGGCTGCAGGATCAGCGGCAACAGATGCTCTCCCGTTTGCACTACAGCTTTCACGGA
CACCATTCCAAAAAGGGGCAGGTTGCAAAGTTAGACTTGGAATGCATGGTGCCGGTCAGTGGGCACGAGAACTGC
TGTCTGACCTGTGATAAAATGAGACAAGCAGACCTCAGCAACGATAAGATCCTCTCGCTTGTTCACTGGGGCATG
TACAGTGGGCACGGGAAGCTGGAATTCGTA

[0534] A nucleic acid sequence encoding a processed extracellular BAMBI is shown below (SEQ ID NO: 552):

(SEQ ID NO: 552)

GTGCTGCTCACCAAAGGTGAAATTCGATGCTACTGTGATGCTGCCCACTG
TGTAGCCACTGGTTATATGTGTAAATCTGAGCTCAGCGCCTGCTTCTCTA
GACTTCTTGATCCTCAGAACTCAAATTCCCCACTCACCCATGGCTGCCTG
GACTCTCTTGCAAGCACGACAGACATCTGCCAAGCCAAACAGGCCCGAAA
CCACTCTGGCACCACCATACCCACATTGGAATGCTGTCATGAAGACATGT
GCAATTACAGAGGGCTGCACGATGTTCTCTCTCCTCCCAGGGGTGAGGCC
TCAGGACAAGGAAACAGGTATCAGCATGATGGTAGCAGAAACCTTATCAC
CAAGGTGCAGGAGCTGACTTCTTCCAAAGAGTTGTGGTTCCGGGCA

[0535] In certain embodiments, the disclosure relates to heteromultimers that comprise at least one BAMBI polypeptide, which includes fragments, functional variants, and modified forms thereof. Preferably, BAMBI polypeptides for use in accordance with the disclosure (e.g., heteromultimers comprising a BAMBI polypeptide and uses thereof) are soluble (e.g., an extracellular domain of BAMBI). In other preferred embodiments, BAMBI polypeptides for use in accordance with disclosure bind to and/or inhibit (antagonize) activity (e.g., Smad signaling) of one or more TGF-beta superfamily ligands. In some embodiments, heteromultimers of the disclosure comprise at least one BAMBI polypeptide that is at least 70%, 75%, 80%, 85%, 90%, 91%, 92%, 93%, 94%, 95%, 96%, 97%, 98%, 99%, or 100% identical to the amino acid sequence of SEQ ID NOs: 549 or 550. In some embodiments, heteromultimers of the disclosure comprise at least one BAMBI polypeptide that is at least 70%, 75%, 80%, 85%, 90%, 91%, 92%, 93%, 94%, 95%, 96%, 97%, 98%, 99%, or 100% identical to a polypeptide that begins at any one of amino acids of 21-30 (e.g., amino acid residues 21, 22, 23, 24, 25, 26, 27, 28, 29, or 30) of SEQ ID NO: 549, and ends at any one of amino acids 104-152 (e.g., amino acid residues 104, 105, 106, 107, 108, 109, 110, 111, 112, 113, 114, 115, 116, 117, 118, 119, 120, 121, 122, 123, 124, 125, 126, 127, 128, 129, 130, 131, 132, 133, 134, 135, 136, 137, 138, 139, 140, 141, 142, 143, 144, 145, 146, 147, 148, 149, 150, 151, or 152) of SEQ ID NO: 549. In some embodiments, heteromultimers of the disclosure comprise at least one BAMBI polypeptide that is at least 70%, 75%, 80%, 85%, 90%, 91%, 92%, 93%, 94%, 95%, 96%, 97%, 98%, 99%, or 100% identical to amino acids of 21-104 of SEQ ID NO: 549. In some embodiments, heteromultimers of the disclosure comprise at least one BAMBI polypeptide that is at least 70%, 75%, 80%, 85%, 90%, 91%, 92%, 93%, 94%, 95%, 96%, 97%, 98%, 99%, or 100% identical to amino acids of 21-152 of SEQ ID NO: 549. In some embodiments, heteromultimers of the disclosure comprise at least one BAMBI polypeptide that is at least 70%, 75%, 80%, 85%, 90%, 91%, 92%, 93%, 94%, 95%, 96%, 97%, 98%, 99%, or 100% identical to amino acids of 30-104 of SEQ ID NO: 549. In some embodiments, heteromultimers of the disclosure comprise at least one BAMBI polypeptide that is at least 70%, 75%, 80%, 85%, 90%, 91%, 92%, 93%, 94%, 95%, 96%, 97%, 98%, 99%, or 100% identical to amino acids of 30-152 of SEQ ID NO: 549. In some embodiments, heteromultimers of the disclosure comprise at least one BAMBI polypeptide that is at least 70%, 75%, 80%, 85%, 90%, 91%, 92%, 93%, 94%, 95%, 96%, 97%, 98%, 99%, or 100% identical to amino acids of 27-152 of SEQ ID NO: 549.

[0536] The term “BMPER polypeptide” includes polypeptides comprising any naturally occurring BMPER protein (encoded by BMPER or one of its nonhuman orthologs) as well as any variants thereof (including mutants, fragments, fusions, and peptidomimetic forms) that retain a useful activity.

[0537] A human BMPER precursor protein sequence (NCBI Ref Seq NP_597725.1) is as follows:

| (SEQ ID NO: 553) | |
|---|---|
| 1 | MLWFSGVGAL AERYCRRSPG ITCCVLLLLN CSGVPMSLAS SFLTGSVAKC ENEGEVLQIP |
| 61 | FITDNPCIMC VCLNKEVTCK REKCPVLSRD CALAIKQRGA CCEQCKGCTY EGNTYNSSFK |
| 121 | WQSPAEPCVL RQCQEGVVTE SGVRCVVHCK NPLEHLGMCC PTCPGCVFEG VQYQEGEEFQ |
| 181 | PEGSKCTKCS CTGGRTQCVR EVCPILSCPQ HLSHIPPGQC CPKCLGQRKV FDLPFGSCLF |
| 241 | RSDVYDNGSS FLYDNCTACT CRDSTVVCKR KCSHPGGCDQ GQEGCCEECL LRVPPEDIKV |
| 301 | CKFGNKIFQD GEMWSSINCT ICACVKGRTE CRNKQCIPIS SCPQGKILNR KGCCPICTEK |
| 361 | PGVCTVFGDP HYNTFDGRTF NFQGTCQYVL TKDCSSPASP FQVLVKNDAR RTRSFSWTKS |
| 421 | VELVLGESRV SLQQHLTVRW NGSRIALPCR APHFHIDLDG YLLKVTTKAG LEISWDGDSF |
| 481 | VEVMAAPHLK GKLCGLCGNY NGHKRDDLIG GDGNFKFDVD DFAESWRVES NEFCNRPQRK |
| 541 | PVPELCQGTV KVKLRAHREC QKLKSWEFQT CHSTVDYATF YRSCVTDMCE CPVHKNCYCE |
| 601 | SFLAYTRACQ REGIKVHWEP QQNCAATQCK HGAVYDTCGP GCIKTCDNWN EIGPCNKPCV |
| 661 | AGCHCPANLV LHKGRCIKPV LCPQR |

[0538] The signal peptide is indicated by a single underline.

[0539] A mature BMPER polypeptide sequence is as follows:

(SEQ ID NO: 554)

SSFLTGSVAKCENEGEVLQIPFITDNPCIMCVCLNKEVTCKREKCPVLSR
DCALAIKQRGACCEQCKGCTYEGNTYNSSFKWQSPAEPCVLRQCQEGVVT
ESGVRCVVHCKNPLEHLGMCCPTCPGCVFEGVQYQEGEEFQPEGSKCTKC
SCTGGRTQCVREVCPILSCPQHLSHIPPGQCCPKCLGQRKVFDLPFGSCL
FRSDVYDNGSSFLYDNCTACTCRDSTVVCKRKCSHPGGCDQGQEGCCEEC
LLRVPPEDIKVCKFGNKIFQDGEMWSSINCTICACVKGRTECRNKQCIPI
SSCPQGKILNRKGCCPICTEKPGVCTVFGDPHYNTFDGRTFNFQGTCQYV
LTKDCSSPASPFQVLVKNDARRTRSFSWTKSVELVLGESRVSLQQHLTVR
WNGSRIALPCRAPHFHIDLDGYLLKVTTKAGLEISWDGDSFVEVMAAPHL
KGKLCGLCGNYNGHKRDDLIGGDGNFKFDVDDFAESWRVESNEFCNRPQR
KPVPELCQGTVKVKLRAHRECQKLKSWEFQTCHSTVDYATFYRSCVTDMC
ECPVHKNCYCESFLAYTRACQREGIKVHWEPQQNCAATQCKHGAVYDTCG
PGCIKTCDNWNEIGPCNKPCVAGCHCPANLVLHKGRCIKPVLCPQR

[0540] A nucleic acid sequence encoding unprocessed human BMPER precursor protein is shown below (SEQ ID NO: 555), corresponding to nucleotides 375-2429 of NCBI Reference Sequence NM_133468.4. The signal sequence is underlined.

(SEQ ID NO: 555)

ATGCTCTGGTTCTCCGGCGTCGGGGCTCTGGCTGAGCGTTACTGCCGCCG
CTCGCCTGGGATTACGTGCTGCGTCTTGCTGCTACTCAATTGCTCGGGGG
TCCCCATGTCTCTGGCTTCCTCCTTCTTGACAGGTTCTGTTGCAAAATGT
GAAAATGAAGGTGAAGTCCTCCAGATTCCATTTATCACAGACAACCCTTG
CATAATGTGTGTCTGCTTGAACAAGGAAGTGACATGTAAGAGAGAGAAGT
GCCCCGTGCTGTCCCGAGACTGTGCCCTGGCCATCAAGCAGAGGGGAGCC
TGTTGTGAACAGTGCAAAGGTTGCACCTATGAAGGAAATACCTATAACAG
CTCCTTCAAATGGCAGAGCCCGGCTGAGCCTTGTGTTCTACGCCAGTGCC
AGGAGGGCGTTGTCACAGAGTCTGGGGTGCGCTGTGTTGTTCATTGTAAA
AACCCTTTGGAGCATCTGGGAATGTGCTGCCCCACATGTCCAGGCTGTGT
GTTTGAGGGTGTGCAGTATCAAGAAGGGGAGGAATTTCAGCCAGAAGGAA
GCAAATGTACCAAGTGTTCCTGCACTGGAGGCAGGACACAATGTGTGAGA
GAAGTCTGTCCCATTCTCTCCTGTCCCCAGCACCTTAGTCACATACCCCC
AGGACAGTGCTGCCCCAAATGTTTGGGTCAGAGGAAAGTGTTTGACCTCC
CTTTTGGGAGCTGCCTCTTTCGAAGTGATGTTTATGACAATGGATCCTCA
TTTCTGTACGATAACTGCACAGCTTGTACCTGCAGGGACTCTACTGTGGT
TTGCAAGAGGAAGTGCTCCCACCCTGGTGGCTGTGACCAAGGCCAGGAGG
GCTGTTGTGAAGAGTGCCTCCTACGAGTGCCCCCAGAAGACATCAAAGTA
TGCAAATTTGGCAACAAGATTTTCCAGGATGGAGAGATGTGGTCCTCTAT
CAATTGTACCATCTGTGCTTGTGTGAAAGGCAGGACGGAGTGTCGCAATA
AGCAGTGCATTCCCATCAGTAGCTGCCCACAGGGCAAAATTCTCAACAGA
AAAGGATGCTGTCCTATTTGCACTGAAAAGCCCGGCGTTTGCACGGTGTT
TGGAGATCCCCACTACAACACTTTTGACGGTCGGACATTTAACTTTCAGG
GGACGTGTCAGTACGTTTTGACAAAAGACTGCTCCTCCCCTGCCTCGCCC
TTCCAGGTGCTGGTGAAGAACGACGCCCGCCGGACACGCTCCTTCTCGTG
GACCAAGTCGGTGGAGCTGGTGCTGGGCGAGAGCAGGGTCAGCCTGCAGC
AGCACCTCACCGTGCGCTGGAACGGCTCGCGCATCGCGCTCCCCTGCCGC
GCGCCACACTTCCACATCGACCTGGATGGCTACCTCTTGAAAGTGACCAC
CAAAGCAGGTTTGGAAATATCTTGGGATGGAGACAGTTTTGTAGAAGTCA
TGGCTGCGCCGCATCTCAAGGGCAAGCTCTGTGGTCTTTGTGGCAACTAC
AATGGACATAAACGTGATGACTTAATTGGTGGAGATGGAAACTTCAAGTT
TGATGTGGATGACTTTGCTGAATCTTGGAGGGTGGAGTCCAATGAGTTCT
GCAACAGACCTCAGAGAAAGCCAGTGCCTGAACTGTGTCAAGGGACAGTC
AAGGTAAAGCTCCGGGCCCATCGAGAATGCCAAAAGCTCAAATCCTGGGA
GTTTCAGACCTGCCACTCGACTGTGGACTACGCCACTTTCTACCGGTCCT
GTGTGACAGACATGTGTGAATGTCCAGTCCATAAAAACTGTTATTGCGAG
TCATTTTTGGCATATACCCGGGCCTGCCAGAGAGAGGGCATCAAAGTCCA
CTGGGAGCCTCAGCAGAATTGTGCAGCCACCCAGTGTAAGCATGGTGCTG
TGTACGATACCTGTGGTCCGGGATGTATCAAGACGTGTGACAACTGGAAT
GAAATTGGTCCATGCAACAAGCCGTGCGTTGCTGGGTGCCACTGTCCAGC
AAACTTGGTCCTTCACAAGGGAAGGTGCATCAAGCCAGTCCTTTGTCCCC
AGCGG

[0541] A nucleic acid sequence encoding a processed BMPER is shown below (SEQ ID NO: 556):

(SEQ ID NO: 556)

TCCTCCTTCTTGACAGGTTCTGTTGCAAAATGTGAAAATGAAGGTGAAGT
CCTCCAGATTCCATTTATCACAGACAACCCTTGCATAATGTGTGTCTGCT
TGAACAAGGAAGTGACATGTAAGAGAGAGAAGTGCCCCGTGCTGTCCCGA
GACTGTGCCCTGGCCATCAAGCAGAGGGGAGCCTGTTGTGAACAGTGCAA
AGGTTGCACCTATGAAGGAAATACCTATAACAGCTCCTTCAAATGGCAGA
GCCCGGCTGAGCCTTGTGTTCTACGCCAGTGCCAGGAGGGCGTTGTCACA
GAGTCTGGGGTGCGCTGTGTTGTTCATTGTAAAAACCCTTTGGAGCATCT
GGGAATGTGCTGCCCCACATGTCCAGGCTGTGTGTTTGAGGGTGTGCAGT
ATCAAGAAGGGGAGGAATTTCAGCCAGAAGGAAGCAAATGTACCAAGTGT
TCCTGCACTGGAGGCAGGACACAATGTGTGAGAGAAGTCTGTCCCATTCT
CTCCTGTCCCCAGCACCTTAGTCACATACCCCCAGGACAGTGCTGCCCCA
AATGTTTGGGTCAGAGGAAAGTGTTTGACCTCCCTTTTGGGAGCTGCCTC
TTTCGAAGTGATGTTTATGACAATGGATCCTCATTTCTGTACGATAACTG
CACAGCTTGTACCTGCAGGGACTCTACTGTGGTTTGCAAGAGGAAGTGCT
CCCACCCTGGTGGCTGTGACCAAGGCCAGGAGGGCTGTTGTGAAGAGTGC
CTCCTACGAGTGCCCCCAGAAGACATCAAAGTATGCAAATTTGGCAACAA
GATTTTCCAGGATGGAGAGATGTGGTCCTCTATCAATTGTACCATCTGTG
CTTGTGTGAAAGGCAGGACGGAGTGTCGCAATAAGCAGTGCATTCCCATC
AGTAGCTGCCCACAGGGCAAAATTCTCAACAGAAAAGGATGCTGTCCTAT
TTGCACTGAAAAGCCCGGCGTTTGCACGGTGTTTGGAGATCCCCACTACA
ACACTTTTGACGGTCGGACATTTAACTTTCAGGGGACGTGTCAGTACGTT
TTGACAAAAGACTGCTCCTCCCCTGCCTCGCCCTTCCAGGTGCTGGTGAA
GAACGACGCCCGCCGGACACGCTCCTTCTCGTGGACCAAGTCGGTGGAGC
TGGTGCTGGGCGAGAGCAGGGTCAGCCTGCAGCAGCACCTCACCGTGCGC
TGGAACGGCTCGCGCATCGCGCTCCCCTGCCGCGCGCCACACTTCCACAT
CGACCTGGATGGCTACCTCTTGAAAGTGACCACCAAAGCAGGTTTGGAAA
TATCTTGGGATGGAGACAGTTTTGTAGAAGTCATGGCTGCGCCGCATCTC
AAGGGCAAGCTCTGTGGTCTTTGTGGCAACTACAATGGACATAAACGTGA
TGACTTAATTGGTGGAGATGGAAACTTCAAGTTTGATGTGGATGACTTTG
CTGAATCTTGGAGGGTGGAGTCCAATGAGTTCTGCAACAGACCTCAGAGA
AAGCCAGTGCCTGAACTGTGTCAAGGGACAGTCAAGGTAAAGCTCCGGGC
CCATCGAGAATGCCAAAAGCTCAAATCCTGGGAGTTTCAGACCTGCCACT
CGACTGTGGACTACGCCACTTTCTACCGGTCCTGTGTGACAGACATGTGT
GAATGTCCAGTCCATAAAAACTGTTATTGCGAGTCATTTTTGGCATATAC
CCGGGCCTGCCAGAGAGAGGGCATCAAAGTCCACTGGGAGCCTCAGCAGA
ATTGTGCAGCCACCCAGTGTAAGCATGGTGCTGTGTACGATACCTGTGGT
CCGGGATGTATCAAGACGTGTGACAACTGGAATGAAATTGGTCCATGCAA
CAAGCCGTGCGTTGCTGGGTGCCACTGTCCAGCAAACTTGGTCCTTCACA
AGGGAAGGTGCATCAAGCCAGTCCTTTGTCCCCAGCGG

[0542] In certain embodiments, the disclosure relates to heteromultimers that comprise at least one BMPER polypeptide, which includes fragments, functional variants, and modified forms thereof. Preferably, BMPER polypeptides for use in accordance with the disclosure (e.g., heteromultimers comprising a BMPER polypeptide and uses thereof) are soluble (e.g., an extracellular domain of BMPER). In other preferred embodiments, BMPER polypeptides for use in accordance with the disclosure bind to and/or inhibit (antagonize) activity (e.g., Smad signaling) of one or more TGF-beta superfamily ligands. In some embodiments, heteromultimers of the disclosure comprise at least one BMPER polypeptide that is at least 70%, 75%, 80%, 85%, 90%, 91%, 92%, 93%, 94%, 95%, 96%, 97%, 98%, 99%, or 100% identical to the amino acid sequence of SEQ ID NOs: 553 or 554. In some embodiments, heteromultimers of the disclosure comprise at least one BMPER polypeptide that is at least 70%, 75%, 80%, 85%, 90%, 91%, 92%, 93%, 94%, 95%, 96%, 97%, 98%, 99%, or 100% identical to a polypeptide that begins at any one of amino acids of 40-50 (e.g., amino acid residues 40, 41, 42, 43, 44, 45, 46, 47, 48, 49, or 50) of SEQ ID NO: 553, and ends at any one of amino acids 364-369 (e.g., amino acid residues 364, 365, 366, 367, 368, or 369) of SEQ ID NO: 553. In some embodiments, heteromultimers of the disclosure comprise at least one BMPER polypeptide that is at least 70%, 75%, 80%, 85%, 90%, 91%, 92%, 93%, 94%, 95%, 96%, 97%, 98%, 99%, or 100% identical to a polypeptide that begins at any one of amino acids of 370-386 (e.g., amino acid residues 370, 371, 372, 373, 374, 375, 376, 377, 378, 379, 380, 381, 382, 383, 284, 385, or 386) of SEQ ID NO: 553, and ends at any one of amino acids 682-685 (e.g., amino acid residues 682, 683, 684, or 685) of SEQ ID NO: 553. In some embodiments, heteromultimers of the disclosure comprise at least one BMPER polypeptide that is at least 70%, 75%, 80%, 85%, 90%, 91%, 92%, 93%, 94%, 95%, 96%, 97%, 98%, 99%, or 100% identical to a polypeptide that begins at any one of amino acids of 39-50 (e.g., amino acid residues 39, 40, 41, 42, 43, 44, 45, 46, 47, 48, 49, or 50) of SEQ ID NO: 553, and ends at any one of amino acids 682-685 (e.g., amino acid residues 682, 683, 684, or 685) of SEQ ID NO: 553. In some embodiments, heteromultimers of the disclosure comprise at least one BMPER polypeptide that is at least 70%, 75%, 80%, 85%, 90%, 91%, 92%, 93%, 94%, 95%, 96%, 97%, 98%, 99%, or 100% identical to amino acids of 39-364 of SEQ ID NO: 553. In some embodiments, heteromultimers of the disclosure comprise at least one BMPER polypeptide that is at least 70%, 75%, 80%, 85%, 90%, 91%, 92%, 93%, 94%, 95%, 96%, 97%, 98%, 99%, or 100% identical to amino acids of 39-369 of SEQ ID NO: 553. In some embodiments, heteromultimers of the disclosure comprise at least one BMPER polypeptide that is at least 70%, 75%, 80%, 85%, 90%, 91%, 92%, 93%, 94%, 95%, 96%, 97%, 98%, 99%, or 100% identical to amino acids of 39-682 of SEQ ID NO: 553. In some embodiments, heteromultimers of the disclosure comprise at least one BMPER polypeptide that is at least 70%, 75%, 80%, 85%, 90%, 91%, 92%, 93%, 94%, 95%, 96%, 97%, 98%, 99%, or 100% identical to amino acids of 39-685 of SEQ ID NO: 553. In some embodiments, heteromultimers of the disclosure comprise at least one BMPER polypeptide that is at least 70%, 75%, 80%, 85%, 90%, 91%, 92%, 93%, 94%, 95%, 96%, 97%, 98%, 99%, or 100% identical to amino acids of 50-364 of SEQ ID NO: 553. In some embodiments, heteromultimers of the disclosure comprise at least one BMPER polypeptide that is at least 70%, 75%, 80%, 85%, 90%, 91%, 92%, 93%, 94%, 95%, 96%, 97%, 98%, 99%, or 100% identical to amino acids of 50-369 of SEQ ID NO: 553. In some embodiments, heteromultimers of the disclosure comprise at least one BMPER polypeptide that is at least 70%, 75%, 80%, 85%, 90%, 91%, 92%, 93%, 94%, 95%, 96%, 97%, 98%, 99%, or 100% identical to amino acids of 50-682 of SEQ ID NO: 553. In some embodiments, heteromultimers of the disclosure comprise at least one BMPER polypeptide that is at least 70%, 75%, 80%, 85%, 90%, 91%, 92%, 93%, 94%, 95%, 96%, 97%, 98%, 99%, or 100% identical to amino acids of 50-685 of SEQ ID NO: 553. In some embodiments, heteromultimers of the disclosure comprise at least one BMPER polypeptide that is at least 70%, 75%, 80%, 85%, 90%, 91%, 92%, 93%, 94%, 95%, 96%, 97%, 98%, 99%, or 100% identical to amino acids of 370-682 of SEQ ID NO: 553. In some embodiments, heteromultimers of the disclosure comprise at least one BMPER polypeptide that is at least 70%, 75%, 80%, 85%, 90%, 91%, 92%, 93%, 94%, 95%, 96%, 97%, 98%, 99%, or 100% identical to amino acids of 370-685 of SEQ ID NO: 553. In some embodiments, heteromultimers of the disclosure comprise at least one BMPER polypeptide that is at least 70%, 75%, 80%, 85%, 90%, 91%, 92%, 93%, 94%, 95%, 96%, 97%, 98%, 99%, or 100% identical to amino acids of 386-682 of SEQ ID NO: 553. In some embodiments, heteromultimers of the disclosure comprise at least one BMPER polypeptide that is at least 70%, 75%, 80%, 85%, 90%, 91%, 92%, 93%, 94%, 95%, 96%, 97%, 98%, 99%, or 100% identical to amino acids of 386-685 of SEQ ID NO: 553. In some embodiments, heteromultimers of the disclosure comprise at least a BMPER protein, wherein the BMPER protein is a dimer comprising a first polypeptide that is at least 70%, 75%, 80%, 85%, 90%, 91%, 92%, 93%, 94%, 95%, 96%, 97%, 98%, 99%, or 100% identical to a polypeptide that begins at any one of amino acids of 39-50 (e.g., amino acid residues 39, 40, 41, 42, 43, 44, 45, 46, 47, 48, 49, or 50) of SEQ ID NO: 553, and ends at any one of amino acids 364-369 (e.g., amino acid residues 364, 365, 366, 367, 368, or 369) of SEQ ID NO: 553, and second polypeptide that is at least 70%, 75%, 80%, 85%, 90%, 91%, 92%, 93%, 94%, 95%, 96%, 97%, 98%, 99%, or 100% identical to a polypeptide that begins at any one of amino acids of 370-386 (e.g., amino acid residues 370, 371, 372, 373, 374, 375, 376, 377, 378, 379, 380, 381, 382, 383, 284, 385, or 386) of SEQ ID NO: 553, and ends at any one of amino acids 682-685 (e.g., amino acid residues 682, 683, 684, or 685) of SEQ ID NO: 553. In some embodiments, heteromultimers of the disclosure comprise at least one single chain ligand trap that comprises a first BMPER polypeptide domain that is at least 70%, 75%, 80%, 85%, 90%, 91%, 92%, 93%, 94%, 95%, 96%, 97%, 98%, 99%, or 100% identical to a polypeptide that begins at any one of amino acids of 39-50 (e.g., amino acid residues 39, 40, 41, 42, 43, 44, 45, 46, 47, 48, 49, or 50) of SEQ ID NO: 553, and ends at any one of amino acids 364-369 (e.g., amino acid residues 364, 365, 366, 367, 368, or 369) of SEQ ID NO: 553, and second BMPER polypeptide domain that is at least 70%, 75%, 80%, 85%, 90%, 91%, 92%, 93%, 94%, 95%, 96%, 97%, 98%, 99%, or 100% identical to a polypeptide that begins at any one of amino acids of 370-386 (e.g., amino acid residues 370, 371, 372, 373, 374, 375, 376, 377, 378, 379, 380, 381, 382, 383, 284, 385, or 386) of SEQ ID NO: 553, and ends at any one of amino acids 682-685 (e.g., amino acid residues 682, 683, 684, or 685) of SEQ ID NO: 553.

[0543] The term “RGM-B polypeptide” includes polypeptides comprising any naturally occurring RGM-B protein (encoded by RGMB or one of its nonhuman orthologs) as well as any variants thereof (including mutants, fragments, fusions, and peptidomimetic forms) that retain a useful activity.

[0544] A human RGM-B precursor protein sequence (NCBI Ref Seq NP_001012779.2) is as follows:

| (SEQ ID NO: 557) | |
|---|---|
| 1 | MIRKKRKRSA PPGPCRSHGP RPATAPAPPP SPEPTRPAWT GMGLRAAPSS AAAAAAEVEQ |
| 61 | RRSPGLCPPP LELLLLLLFS LGLLHAGDCQ QPAQCRIQKC TTDFVSLTSH LNSAVDGFDS |
| 121 | EFCKALRAYA GCTQRTSKAC RGNLVYHSAV LGISDLMSQR NCSKDGPTSS TNPEVTHDPC |
| 181 | NYHSHAGARE HRRGDQNPPS YLFCGLFGDP HLRTFKDNFQ TCKVEGAWPL IDNNYLSVQV |
| 241 | TNVPVVPGSS ATATNKITII FKAHHECTDQ KVYQAVTDDL PAAFVDGTTS GGDSDAKSLR |
| 301 | IVERESGHYV EMHARYIGTT VFVRQVGRYL TLAIRMPEDL AMSYEESQDL QLCVNGCPLS |
| 361 | ERIDDGQGQV SAILGHSLPR TSLVQAWPGY TLETANTQCH EKMPVKDIYF QSCVFDLLTT |
| 421 | GDANFTAAAH SALEDVEALH PRKERWHIFP SSGNGTPRGG SDLSVSLGLT CLILIVFL |

[0545] The signal peptide is indicated by single underline.

[0546] A processed RGM-B polypeptide sequence is as follows:

(SEQ ID NO: 558)

GDCQQPAQCRIQKCTTDFVSLTSHLNSAVDGFDSEFCKALRAYAGCTQRT
SKACRGNLVYHSAVLGISDLMSQRNCSKDGPTSSTNPEVTHDPCNYHSHA
GAREHRRGDQNPPSYLFCGLFGDPHLRTFKDNFQTCKVEGAWPLIDNNYL
SVQVTNVPVVPGSSATATNKITIIFKAHHECTDQKVYQAVTDDLPAAFVD
GTTSGGDSDAKSLRIVERESGHYVEMHARYIGTTVFVRQVGRYLTLAIRM
PEDLAMSYEESQDLQLCVNGCPLSERIDDGQGQVSAILGHSLPRTSLVQA
WPGYTLETANTQCHEKMPVKDIYFQSCVFDLLTTGDANFTAAAHSALEDV
EALHPRKERWHIFPSS

[0547] A nucleic acid sequence encoding unprocessed human RGM-B precursor protein is shown below (SEQ ID NO: 559), corresponding to nucleotides 403-1836 of NCBI Reference Sequence NM_001012761.2. The signal sequence is underlined.

(SEQ ID NO: 559)

ATGATAAGGAAGAAGAGGAAGCGAAGCGCGCCCCCCGGCCCATGCCGCAG
CCACGGGCCCAGACCCGCCACGGCGCCCGCGCCGCCGCCCTCGCCGGAGC
CCACGAGACCTGCATGGACGGGCATGGGCTTGAGAGCAGCACCTTCCAGC
GCCGCCGCTGCCGCCGCCGAGGTTGAGCAGCGCCGCAGCCCCGGGCTCTG
CCCCCCGCCGCTGGAGCTGCTGCTGCTGCTGCTGTTCAGCCTCGGGCTGC
TCCACGCAGGTGACTGCCAACAGCCAGCCCAATGTCGAATCCAGAAATGC
ACCACGGACTTCGTGTCCCTGACTTCTCACCTGAACTCTGCCGTTGACGG
CTTTGACTCTGAGTTTTGCAAGGCCTTGCGTGCCTATGCTGGCTGCACCC
AGCGAACTTCAAAAGCCTGCCGTGGCAACCTGGTATACCATTCTGCCGTG
TTGGGTATCAGTGACCTCATGAGCCAGAGGAATTGTTCCAAGGATGGACC
CACATCCTCTACCAACCCCGAAGTGACCCATGATCCTTGCAACTATCACA
GCCACGCTGGAGCCAGGGAACACAGGAGAGGGGACCAGAACCCTCCCAGT
TACCTTTTTTGTGGCTTGTTTGGAGATCCTCACCTCAGAACTTTCAAGGA
TAACTTCCAAACATGCAAAGTAGAAGGGGCCTGGCCACTCATAGATAATA
ATTATCTTTCAGTTCAAGTGACAAACGTACCTGTGGTCCCTGGATCCAGT
GCTACTGCTACAAATAAGATCACTATTATCTTCAAAGCCCACCATGAGTG
TACAGATCAGAAAGTCTACCAAGCTGTGACAGATGACCTGCCGGCCGCCT
TTGTGGATGGCACCACCAGTGGTGGGGACAGCGATGCCAAGAGCCTGCGT
ATCGTGGAAAGGGAGAGTGGCCACTATGTGGAGATGCACGCCCGCTATAT
AGGGACCACAGTGTTTGTGCGGCAGGTGGGTCGCTACCTGACCCTTGCCA
TCCGTATGCCTGAAGACCTGGCCATGTCCTACGAGGAGAGCCAGGACCTG
CAGCTGTGCGTGAACGGCTGCCCCCTGAGTGAACGCATCGATGACGGGCA
GGGCCAGGTGTCTGCCATCCTGGGACACAGCCTGCCTCGCACCTCCTTGG
TGCAGGCCTGGCCTGGCTACACACTGGAGACTGCCAACACTCAATGCCAT
GAGAAGATGCCAGTGAAGGACATCTATTTCCAGTCCTGTGTCTTCGACCT
GCTCACCACTGGTGATGCCAACTTTACTGCCGCAGCCCACAGTGCCTTGG
AGGATGTGGAGGCCCTGCACCCAAGGAAGGAACGCTGGCACATTTTCCCC
AGCAGTGGCAATGGGACTCCCCGTGGAGGCAGTGATTTGTCTGTCAGTCT
AGGACTCACCTGCTTGATCCTTATCGTGTTTTTG

[0548] A nucleic acid sequence encoding a processed RGM-B is shown below (SEQ ID NO: 560):

(SEQ ID NO: 560)

GGTGACTGCCAACAGCCAGCCCAATGTCGAATCCAGAAATGCACCACGGA
CTTCGTGTCCCTGACTTCTCACCTGAACTCTGCCGTTGACGGCTTTGACT
CTGAGTTTTGCAAGGCCTTGCGTGCCTATGCTGGCTGCACCCAGCGAACT
TCAAAAGCCTGCCGTGGCAACCTGGTATACCATTCTGCCGTGTTGGGTAT
CAGTGACCTCATGAGCCAGAGGAATTGTTCCAAGGATGGACCCACATCCT
CTACCAACCCCGAAGTGACCCATGATCCTTGCAACTATCACAGCCACGCT
GGAGCCAGGGAACACAGGAGAGGGGACCAGAACCCTCCCAGTTACCTTTT
TTGTGGCTTGTTTGGAGATCCTCACCTCAGAACTTTCAAGGATAACTTCC
AAACATGCAAAGTAGAAGGGGCCTGGCCACTCATAGATAATAATTATCTT
TCAGTTCAAGTGACAAACGTACCTGTGGTCCCTGGATCCAGTGCTACTGC
TACAAATAAGATCACTATTATCTTCAAAGCCCACCATGAGTGTACAGATC
AGAAAGTCTACCAAGCTGTGACAGATGACCTGCCGGCCGCCTTTGTGGAT
GGCACCACCAGTGGTGGGGACAGCGATGCCAAGAGCCTGCGTATCGTGGA
AAGGGAGAGTGGCCACTATGTGGAGATGCACGCCCGCTATATAGGGACCA
CAGTGTTTGTGCGGCAGGTGGGTCGCTACCTGACCCTTGCCATCCGTATG
CCTGAAGACCTGGCCATGTCCTACGAGGAGAGCCAGGACCTGCAGCTGTG
CGTGAACGGCTGCCCCCTGAGTGAACGCATCGATGACGGGCAGGGCCAGG
TGTCTGCCATCCTGGGACACAGCCTGCCTCGCACCTCCTTGGTGCAGGCC
TGGCCTGGCTACACACTGGAGACTGCCAACACTCAATGCCATGAGAAGAT
GCCAGTGAAGGACATCTATTTCCAGTCCTGTGTCTTCGACCTGCTCACCA
CTGGTGATGCCAACTTTACTGCCGCAGCCCACAGTGCCTTGGAGGATGTG
GAGGCCCTGCACCCAAGGAAGGAACGCTGGCACATTTTCCCCAGCAGT

[0549] In certain embodiments, the disclosure relates to heteromultimers that comprise at least one RGM-B polypeptide, which includes fragments, functional variants, and modified forms thereof. Preferably, RGM-B polypeptides for use in accordance with the disclosure (e.g., heteromultimers comprising a RGM-B polypeptide and uses thereof) are soluble (e.g., an extracellular domain of RGM-B). In other preferred embodiments, RGM-B polypeptides for use in accordance with the disclosure bind to and/or inhibit (antagonize) activity (e.g., Smad signaling) of one or more TGF-beta superfamily ligands. In some embodiments, heteromultimers of the disclosure comprise at least one RGM-B polypeptide that is at least 70%, 75%, 80%, 85%, 90%, 91%, 92%, 93%, 94%, 95%, 96%, 97%, 98%, 99%, or 100% identical to the amino acid sequence of SEQ ID NOs: 557 or 558. In some embodiments, heteromultimers of the disclosure comprise at least one RGM-B polypeptide that is at least 70%, 75%, 80%, 85%, 90%, 91%, 92%, 93%, 94%, 95%, 96%, 97%, 98%, 99%, or 100% identical to a polypeptide that begins at any one of amino acids of 1-87 (e.g., amino acid residues 1, 2, 3, 4, 5, 6, 7, 8, 9, 10, 11, 12, 13, 14, 15, 16, 17, 18, 19, 20, 21, 22, 23, 24, 25, 26, 27, 28, 29, 30, 31, 32, 33, 34, 35, 35, 36, 37, 38, 39, 40, 41, 42, 43, 44, 45, 46, 47, 48, 49, 50, 51, 52, 53, 54, 55, 56, 57, 58, 59, 60, 61, 62, 63, 64, 65, 66, 67, 68, 69, 70, 71, 72, 73, 74, 75, 76, 77, 78, 79, 80, 81, 82, 83, 84, 85, 86, or 87) of SEQ ID NO: 557, and ends at any one of amino acids 452-478 (e.g., amino acid residues 452, 453, 454, 455, 456, 457, 458, 459, 460, 461, 462, 463, 464, 465, 466, 467, 468, 469, 470, 471, 472, 473, 474, 475, 476, 477, or 478) of SEQ ID NO: 557. In some embodiments, heteromultimers of the disclosure comprise at least one RGM-B polypeptide that is at least 70%, 75%, 80%, 85%, 90%, 91%, 92%, 93%, 94%, 95%, 96%, 97%, 98%, 99%, or 100% identical to a polypeptide that begins at any one of amino acids of 210-222 (e.g., amino acid residues 210, 211, 212, 213, 214, 215, 216, 217, 218, 219, 220, 221, or 222) of SEQ ID NO: 557, and ends at any one of amino acids 413-452 (e.g., amino acid residues 413, 414, 415, 416, 417, 418, 419, 420, 421, 422, 423, 424, 425, 426, 427, 428, 429, 430, 431, 432, 433, 434, 435, 435, 436, 437, 438, 439, 440, 441, 442, 443, 444, 445, 446, 447, 448, 449, 450, 451, or 452) of SEQ ID NO: 557. In some embodiments, heteromultimers of the disclosure comprise at least one RGM-B polypeptide that is at least 70%, 75%, 80%, 85%, 90%, 91%, 92%, 93%, 94%, 95%, 96%, 97%, 98%, 99%, or 100% identical to a polypeptide that begins at any one of amino acids of 87-95 (e.g., amino acid residues 87, 88, 89, 90, 91, 92, 93, 94 or 95) of SEQ ID NO: 557, and ends at any one of amino acids 204-209 (e.g., amino acid residues 204, 205, 206, 207, 208, or 209) of SEQ ID NO: 557. In some embodiments, heteromultimers of the disclosure comprise of at least one RGM-B polypeptide that is at least 70%, 75%, 80%, 85%, 90%, 91%, 92%, 93%, 94%, 95%, 96%, 97%, 98%, 99%, or 100% identical to amino acids of 1-452 of SEQ ID NO: 557. In some embodiments, heteromultimers of the disclosure comprise of at least one RGM-B polypeptide that is at least 70%, 75%, 80%, 85%, 90%, 91%, 92%, 93%, 94%, 95%, 96%, 97%, 98%, 99%, or 100% identical to amino acids of 87-204 of SEQ ID NO: 557. In some embodiments, heteromultimers of the disclosure comprise of at least one RGM-B polypeptide that is at least 70%, 75%, 80%, 85%, 90%, 91%, 92%, 93%, 94%, 95%, 96%, 97%, 98%, 99%, or 100% identical to amino acids of 87-209 of SEQ ID NO: 557. In some embodiments, heteromultimers of the disclosure comprise of at least one RGM-B polypeptide that is at least 70%, 75%, 80%, 85%, 90%, 91%, 92%, 93%, 94%, 95%, 96%, 97%, 98%, 99%, or 100% identical to amino acids of 95-204 of SEQ ID NO: 557. In some embodiments, heteromultimers of the disclosure comprise of at least one RGM-B polypeptide that is at least 70%, 75%, 80%, 85%, 90%, 91%, 92%, 93%, 94%, 95%, 96%, 97%, 98%, 99%, or 100% identical to amino acids of 95-209 of SEQ ID NO: 557. In some embodiments, heteromultimers of the disclosure comprise of at least one RGM-B polypeptide that is at least 70%, 75%, 80%, 85%, 90%, 91%, 92%, 93%, 94%, 95%, 96%, 97%, 98%, 99%, or 100% identical to amino acids of 210-413 of SEQ ID NO: 557. In some embodiments, heteromultimers of the disclosure comprise of at least one RGM-B polypeptide that is at least 70%, 75%, 80%, 85%, 90%, 91%, 92%, 93%, 94%, 95%, 96%, 97%, 98%, 99%, or 100% identical to amino acids of 210-452 of SEQ ID NO: 557. In some embodiments, heteromultimers of the disclosure comprise of at least one RGM-B polypeptide that is at least 70%, 75%, 80%, 85%, 90%, 91%, 92%, 93%, 94%, 95%, 96%, 97%, 98%, 99%, or 100% identical to amino acids of 222-413 of SEQ ID NO: 557. In some embodiments, heteromultimers of the disclosure comprise of at least one RGM-B polypeptide that is at least 70%, 75%, 80%, 85%, 90%, 91%, 92%, 93%, 94%, 95%, 96%, 97%, 98%, 99%, or 100% identical to amino acids of 222-452 of SEQ ID NO: 557. In some embodiments, heteromultimers of the disclosure comprise of at least one RGM-B polypeptide that is at least 70%, 75%, 80%, 85%, 90%, 91%, 92%, 93%, 94%, 95%, 96%, 97%, 98%, 99%, or 100% identical to amino acids of 87-413 of SEQ ID NO: 557. In some embodiments, heteromultimers of the disclosure comprise of at least one RGM-B polypeptide that is at least 70%, 75%, 80%, 85%, 90%, 91%, 92%, 93%, 94%, 95%, 96%, 97%, 98%, 99%, or 100% identical to amino acids of 87-452 of SEQ ID NO: 557. In some embodiments, heteromultimers of the disclosure comprise of at least one RGM-B polypeptide that is at least 70%, 75%, 80%, 85%, 90%, 91%, 92%, 93%, 94%, 95%, 96%, 97%, 98%, 99%, or 100% identical to amino acids of 95-413 of SEQ ID NO: 557. In some embodiments, heteromultimers of the disclosure comprise of at least one RGM-B polypeptide that is at least 70%, 75%, 80%, 85%, 90%, 91%, 92%, 93%, 94%, 95%, 96%, 97%, 98%, 99%, or 100% identical to amino acids of 95-452 of SEQ ID NO: 557. In some embodiments, heteromultimers of the disclosure comprise at least a RGM-B protein, wherein the RGM-B protein is a dimer comprising a first polypeptide that is at least 70%, 75%, 80%, 85%, 90%, 91%, 92%, 93%, 94%, 95%, 96%, 97%, 98%, 99%, or 100% identical to a polypeptide that begins at any one of amino acids of 87-95 (e.g., amino acid residues 87, 88, 89, 90, 91, 92, 93, 94 or 95) of SEQ ID NO: 557, and ends at any one of amino acids 204-209 (e.g., amino acid residues 204, 205, 206, 207, 208, or 209) of SEQ ID NO: 557, and second polypeptide that is at least 70%, 75%, 80%, 85%, 90%, 91%, 92%, 93%, 94%, 95%, 96%, 97%, 98%, 99%, or 100% identical to a polypeptide that begins at any one of amino acids of 210-222 (e.g., amino acid residues 210, 211, 212, 213, 214, 215, 216, 217, 218, 219, 220, 221, or 222) of SEQ ID NO: 557, and ends at any one of amino acids 413-452 (e.g., amino acid residues 413, 414, 415, 416, 417, 418, 419, 420, 421, 422, 423, 424, 425, 426, 427, 428, 429, 430, 431, 432, 433, 434, 435, 435, 436, 437, 438, 439, 440, 441, 442, 443, 444, 445, 446, 447, 448, 449, 450, 451, or 452) of SEQ ID NO: 557. In some embodiments, heteromultimers of the disclosure comprise at least one single chain ligand trap that comprises a first RGM-B polypeptide domain that is at least 70%, 75%, 80%, 85%, 90%, 91%, 92%, 93%, 94%, 95%, 96%, 97%, 98%, 99%, or 100% identical to a polypeptide that begins at any one of amino acids of 87-95 (e.g., amino acid residues 87, 88, 89, 90, 91, 92, 93, 94 or 95) of SEQ ID NO: 557, and ends at any one of amino acids 204-209 (e.g., amino acid residues 204, 205, 206, 207, 208, or 209) of SEQ ID NO: 557, and second RGM-B polypeptide domain that is at least 70%, 75%, 80%, 85%, 90%, 91%, 92%, 93%, 94%, 95%, 96%, 97%, 98%, 99%, or 100% identical to a polypeptide that begins at any one of amino acids of 210-222 (e.g., amino acid residues 210, 211, 212, 213, 214, 215, 216, 217, 218, 219, 220, 221, or 222) of SEQ ID NO: 557, and ends at any one of amino acids 413-452 (e.g., amino acid residues 413, 414, 415, 416, 417, 418, 419, 420, 421, 422, 423, 424, 425, 426, 427, 428, 429, 430, 431, 432, 433, 434, 435, 435, 436, 437, 438, 439, 440, 441, 442, 443, 444, 445, 446, 447, 448, 449, 450, 451, or 452) of SEQ ID NO: 557. In some embodiments, heteromultimers of the disclosure comprise at least one RGM-B polypeptide that is at least 70%, 75%, 80%, 85%, 90%, 91%, 92%, 93%, 94%, 95%, 96%, 97%, 98%, 99%, or 100% identical to a polypeptide that begins at any one of amino acids of 87-89 (e.g., amino acid residues 87, 88, or 89) of SEQ ID NO: 557, and ends at any one of amino acids 471-478 (e.g., amino acid residues 471, 472, 473, 474, 475, 476, 477, or 478) of SEQ ID NO: 557. In some embodiments, heteromultimers of the disclosure comprise at least one RGM-B polypeptide that is at least 70%, 75%, 80%, 85%, 90%, 91%, 92%, 93%, 94%, 95%, 96%, 97%, 98%, 99%, or 100% identical to amino acids 87-478 of SEQ ID NO: 557. In some embodiments, heteromultimers of the disclosure comprise at least one RGM-B polypeptide that is at least 70%, 75%, 80%, 85%, 90%, 91%, 92%, 93%, 94%, 95%, 96%, 97%, 98%, 99%, or 100% identical to amino acids 89-471 of SEQ ID NO: 557.

[0550] The term “RGM-A polypeptide” includes polypeptides comprising any naturally occurring RGM-A protein (encoded by RGMA or one of its nonhuman orthologs) as well as any variants thereof (including mutants, fragments, fusions, and peptidomimetic forms) that retain a useful activity.

[0551] A human RGM-A isoform 1 precursor protein sequence (NCBI Ref Seq NP_001159755.1) is as follows:

| (SEQ ID NO: 561) | |
|---|---|
| 1 | MGGLGPRRAG TSRERLVVTG RAGWMGMGRG AGRSALGFWP TLAFLLCSFP AATSPCKILK |
| 61 | CNSEFWSATS GSHAPASDDT PEFCAALRSY ALCTRRTART CRGDLAYHSA VHGIEDLMSQ |
| 121 | HNCSKDGPTS QPRLRTLPPA GDSQERSDSP EICHYEKSFH KHSATPNYTH CGLFGDPHLR |
| 181 | TFTDRFQTCK VQGAWPLIDN NYLNVQVTNT PVLPGSAATA TSKLTIIFKN FQECVDQKVY |
| 241 | QAEMDELPAA FVDGSKNGGD KHGANSLKIT EKVSGQHVEI QAKYIGTTIV VRQVGRYLTF |
| 301 | AVRMPEEVVN AVEDWDSQGL YLCLRGCPLN QQIDFQAFHT NAEGTGARRL AAASPAPTAP |
| 361 | ETFPYETAVA KCKEKLPVED LYYQACVFDL LTTGDVNFTL AAYYALEDVK MLHSNKDKLH |
| 421 | LYERTRDLPG RAAAGLPLAP RPLLGALVPL LALLPVFC |

[0552] The signal peptide is indicated by solid underline.

[0553] A processed RGM-A isoform 1 polypeptide sequence is as follows:

(SEQ ID NO: 562)

CKILKCNSEFWSATSGSHAPASDDTPEFCAALRSYALCTRRTARTCRGDL
AYHSAVHGIEDLMSQHNCSKDGPTSQPRLRTLPPAGDSQERSDSPEICHY
EKSFHKHSATPNYTHCGLFGDPHLRTFTDRFQTCKVQGAWPLIDNNYLNV
QVTNTPVLPGSAATATSKLTIIFKNFQECVDQKVYQAEMDELPAAFVDGS
KNGGDKHGANSLKITEKVSGQHVEIQAKYIGTTIVVRQVGRYLTFAVRMP
EEVVNAVEDWDSQGLYLCLRGCPLNQQIDFQAFHTNAEGTGARRLAAASP
APTAPETFPYETAVAKCKEKLPVEDLYYQACVFDLLTTGDVNFTLAAYYA
LEDVKMLHS

[0554] A nucleic acid sequence encoding unprocessed human RGM-A isoform 1 precursor protein is shown below (SEQ ID NO: 563), corresponding to nucleotides 232-1605 of NCBI Reference Sequence NM_001166283.1. The signal sequence is underlined.

(SEQ ID NO: 563)

ATGGGTGGCCTGGGGCCACGACGGGCGGGAACCTCGAGGGAGAGGCTAGT
GGTAACAGGCCGAGCTGGATGGATGGGTATGGGGAGAGGGGCAGGACGTT
CAGCCCTGGGATTCTGGCCGACCCTCGCCTTCCTTCTCTGCAGCTTCCCC
GCAGCCACCTCCCCGTGCAAGATCCTCAAGTGCAACTCTGAGTTCTGGAG
CGCCACGTCGGGCAGCCACGCCCCAGCCTCAGACGACACCCCCGAGTTCT
GTGCAGCCTTGCGCAGCTACGCCCTGTGCACGCGGCGGACGGCCCGCACC
TGCCGGGGTGACCTGGCCTACCACTCGGCCGTCCATGGCATAGAGGACCT
CATGAGCCAGCACAACTGCTCCAAGGATGGCCCCACCTCGCAGCCACGCC
TGCGCACGCTCCCACCGGCCGGAGACAGCCAGGAGCGCTCGGACAGCCCC
GAGATCTGCCATTACGAGAAGAGCTTTCACAAGCACTCGGCCACCCCCAA
CTACACGCACTGTGGCCTCTTCGGGGACCCACACCTCAGGACTTTCACCG
ACCGCTTCCAGACCTGCAAGGTGCAGGGCGCCTGGCCGCTCATCGACAAT
AATTACCTGAACGTGCAGGTCACCAACACGCCTGTGCTGCCCGGCTCAGC
GGCCACTGCCACCAGCAAGCTCACCATCATCTTCAAGAACTTCCAGGAGT
GTGTGGACCAGAAGGTGTACCAGGCTGAGATGGACGAGCTCCCGGCCGCC
TTCGTGGATGGCTCTAAGAACGGTGGGGACAAGCACGGGGCCAACAGCCT
GAAGATCACTGAGAAGGTGTCAGGCCAGCACGTGGAGATCCAGGCCAAGT
ACATCGGCACCACCATCGTGGTGCGCCAGGTGGGCCGCTACCTGACCTTT
GCCGTCCGCATGCCAGAGGAAGTGGTCAATGCTGTGGAGGACTGGGACAG
CCAGGGTCTCTACCTCTGCCTGCGGGGCTGCCCCCTCAACCAGCAGATCG
ACTTCCAGGCCTTCCACACCAATGCTGAGGGCACCGGTGCCCGCAGGCTG
GCAGCCGCCAGCCCTGCACCCACAGCCCCCGAGACCTTCCCATACGAGAC
AGCCGTGGCCAAGTGCAAGGAGAAGCTGCCGGTGGAGGACCTGTACTACC
AGGCCTGCGTCTTCGACCTCCTCACCACGGGCGACGTGAACTTCACACTG
GCCGCCTACTACGCGTTGGAGGATGTCAAGATGCTCCACTCCAACAAAGA
CAAACTGCACCTGTATGAGAGGACTCGGGACCTGCCAGGCAGGGCGGCTG
CGGGGCTGCCCCTGGCCCCCCGGCCCCTCCTGGGCGCCCTCGTCCCGCTC
CTGGCCCTGCTCCCTGTGTTCTGC

[0555] A nucleic acid sequence encoding a processed RGM-A isoform 1 is shown below (SEQ ID NO: 564):

(SEQ ID NO: 564)

TGCAAGATCCTCAAGTGCAACTCTGAGTTCTGGAGCGCCACGTCGGGCAG
CCACGCCCCAGCCTCAGACGACACCCCCGAGTTCTGTGCAGCCTTGCGCA
GCTACGCCCTGTGCACGCGGCGGACGGCCCGCACCTGCCGGGGTGACCTG
GCCTACCACTCGGCCGTCCATGGCATAGAGGACCTCATGAGCCAGCACAA
CTGCTCCAAGGATGGCCCCACCTCGCAGCCACGCCTGCGCACGCTCCCAC
CGGCCGGAGACAGCCAGGAGCGCTCGGACAGCCCCGAGATCTGCCATTAC
GAGAAGAGCTTTCACAAGCACTCGGCCACCCCCAACTACACGCACTGTGG
CCTCTTCGGGGACCCACACCTCAGGACTTTCACCGACCGCTTCCAGACCT
GCAAGGTGCAGGGCGCCTGGCCGCTCATCGACAATAATTACCTGAACGTG
CAGGTCACCAACACGCCTGTGCTGCCCGGCTCAGCGGCCACTGCCACCAG
CAAGCTCACCATCATCTTCAAGAACTTCCAGGAGTGTGTGGACCAGAAGG
TGTACCAGGCTGAGATGGACGAGCTCCCGGCCGCCTTCGTGGATGGCTCT
AAGAACGGTGGGGACAAGCACGGGGCCAACAGCCTGAAGATCACTGAGAA
GGTGTCAGGCCAGCACGTGGAGATCCAGGCCAAGTACATCGGCACCACCA
TCGTGGTGCGCCAGGTGGGCCGCTACCTGACCTTTGCCGTCCGCATGCCA
GAGGAAGTGGTCAATGCTGTGGAGGACTGGGACAGCCAGGGTCTCTACCT
CTGCCTGCGGGGCTGCCCCCTCAACCAGCAGATCGACTTCCAGGCCTTCC
ACACCAATGCTGAGGGCACCGGTGCCCGCAGGCTGGCAGCCGCCAGCCCT
GCACCCACAGCCCCCGAGACCTTCCCATACGAGACAGCCGTGGCCAAGTG
CAAGGAGAAGCTGCCGGTGGAGGACCTGTACTACCAGGCCTGCGTCTTCG
ACCTCCTCACCACGGGCGACGTGAACTTCACACTGGCCGCCTACTACGCG
TTGGAGGATGTCAAGATGCTCCACTCC

[0556] A human RGM-A isoform 2 precursor protein sequence (NCBI Ref Seq NP_001159758.1) is as follows:

| (SEQ ID NO: 565) | |
|---|---|
| 1 | MGMGRGAGRS ALGFWPTLAF LLCSFPAATS PCKILKCNSE FWSATSGSHA PASDDTPEFC |
| 61 | AALRSYALCT RRTARTCRGD LAYHSAVHGI EDLMSQHNCS KDGPTSQPRL RTLPPAGDSQ |
| 121 | ERSDSPEICH YEKSFHKHSA TPNYTHCGLF GDPHLRTFTD RFQTCKVQGA WPLIDNNYLN |
| 181 | VQVTNTPVLP GSAATATSKL TIIFKNFQEC VDQKVYQAEM DELPAAFVDG SKNGGDKHGA |
| 241 | NSLKITEKVS GQHVEIQAKY IGTTIVVRQV GRYLTFAVRM PEEVVNAVED WDSQGLYLCL |
| 301 | RGCPLNQQID FQAFHTNAEG TGARRLAAAS PAPTAPETFP YETAVAKCKE KLPVEDLYYQ |
| 361 | ACVFDLLTTG DVNFTLAAYY ALEDVKMLHS NKDKLHLYER TRDLPGRAAA GLPLAPRPLL |
| 421 | GALVPLLALL PVFC |

[0557] The signal peptide is indicated by solid underline.

[0558] A mature RGM-A isoform 2 sequence is as follows: CKILKCNSEFWSATSGSHAPASDDTPEFCAALRSYALCTRRTARTCRGDLAYHSAVHGIEDLMSQHNCSKDGPTS QPRLRTLPPAGDSQERSDSPEICHYEKSFHKHSATPNYTHCGLFGDPHLRTFTDRFQTCKVQGAWPLIDNNYLNV QVTNTPVLPGSAATATSKLTIIFKNFQECVDQKVYQAEMDELPAAFVDGSKNGGDKHGANSLKITEKVSGQHVEI QAKYIGTTIVVRQVGRYLTFAVRMPEEVVNAVEDWDSQGLYLCLRGCPLNQQIDFQAFHTNAEGTGARRLAAASP APTAPETFPYETAVAKCKEKLPVEDLYYQACVFDLLTTGDVNFTLAAYYALEDVKMLHS (SEQ ID NO: 566)

[0559] A nucleic acid sequence encoding unprocessed human RGM-A isoform 2 precursor protein is shown below (SEQ ID NO: 567), corresponding to nucleotides 164-1465 of NCBI Reference Sequence NM_001166286.1. The signal sequence is underlined.

(SEQ ID NO: 567)

ATGGGTATGGGGAGAGGGGCAGGACGTTCAGCCCTGGGATTCTGGCCGAC
CCTCGCCTTCCTTCTCTGCAGCTTCCCCGCAGCCACCTCCCCGTGCAAGA
TCCTCAAGTGCAACTCTGAGTTCTGGAGCGCCACGTCGGGCAGCCACGCC
CCAGCCTCAGACGACACCCCCGAGTTCTGTGCAGCCTTGCGCAGCTACGC
CCTGTGCACGCGGCGGACGGCCCGCACCTGCCGGGGTGACCTGGCCTACC
ACTCGGCCGTCCATGGCATAGAGGACCTCATGAGCCAGCACAACTGCTCC
AAGGATGGCCCCACCTCGCAGCCACGCCTGCGCACGCTCCCACCGGCCGG
AGACAGCCAGGAGCGCTCGGACAGCCCCGAGATCTGCCATTACGAGAAGA
GCTTTCACAAGCACTCGGCCACCCCCAACTACACGCACTGTGGCCTCTTC
GGGGACCCACACCTCAGGACTTTCACCGACCGCTTCCAGACCTGCAAGGT
GCAGGGCGCCTGGCCGCTCATCGACAATAATTACCTGAACGTGCAGGTCA
CCAACACGCCTGTGCTGCCCGGCTCAGCGGCCACTGCCACCAGCAAGCTC
ACCATCATCTTCAAGAACTTCCAGGAGTGTGTGGACCAGAAGGTGTACCA
GGCTGAGATGGACGAGCTCCCGGCCGCCTTCGTGGATGGCTCTAAGAACG
GTGGGGACAAGCACGGGGCCAACAGCCTGAAGATCACTGAGAAGGTGTCA
GGCCAGCACGTGGAGATCCAGGCCAAGTACATCGGCACCACCATCGTGGT
GCGCCAGGTGGGCCGCTACCTGACCTTTGCCGTCCGCATGCCAGAGGAAG
TGGTCAATGCTGTGGAGGACTGGGACAGCCAGGGTCTCTACCTCTGCCTG
CGGGGCTGCCCCCTCAACCAGCAGATCGACTTCCAGGCCTTCCACACCAA
TGCTGAGGGCACCGGTGCCCGCAGGCTGGCAGCCGCCAGCCCTGCACCCA
CAGCCCCCGAGACCTTCCCATACGAGACAGCCGTGGCCAAGTGCAAGGAG
AAGCTGCCGGTGGAGGACCTGTACTACCAGGCCTGCGTCTTCGACCTCCT
CACCACGGGCGACGTGAACTTCACACTGGCCGCCTACTACGCGTTGGAGG
ATGTCAAGATGCTCCACTCCAACAAAGACAAACTGCACCTGTATGAGAGG
ACTCGGGACCTGCCAGGCAGGGCGGCTGCGGGGCTGCCCCTGGCCCCCCG
GCCCCTCCTGGGCGCCCTCGTCCCGCTCCTGGCCCTGCTCCCTGTGTTCT
GC

[0560] A nucleic acid sequence encoding a processed RGM-A isoform 2 is shown below (SEQ ID NO: 568):

(SEQ ID NO: 568)

TGCAAGATCCTCAAGTGCAACTCTGAGTTCTGGAGCGCCACGTCGGGCAG
CCACGCCCCAGCCTCAGACGACACCCCCGAGTTCTGTGCAGCCTTGCGCA
GCTACGCCCTGTGCACGCGGCGGACGGCCCGCACCTGCCGGGGTGACCTG
GCCTACCACTCGGCCGTCCATGGCATAGAGGACCTCATGAGCCAGCACAA
CTGCTCCAAGGATGGCCCCACCTCGCAGCCACGCCTGCGCACGCTCCCAC
CGGCCGGAGACAGCCAGGAGCGCTCGGACAGCCCCGAGATCTGCCATTAC
GAGAAGAGCTTTCACAAGCACTCGGCCACCCCCAACTACACGCACTGTGG
CCTCTTCGGGGACCCACACCTCAGGACTTTCACCGACCGCTTCCAGACCT
GCAAGGTGCAGGGCGCCTGGCCGCTCATCGACAATAATTACCTGAACGTG
CAGGTCACCAACACGCCTGTGCTGCCCGGCTCAGCGGCCACTGCCACCAG
CAAGCTCACCATCATCTTCAAGAACTTCCAGGAGTGTGTGGACCAGAAGG
TGTACCAGGCTGAGATGGACGAGCTCCCGGCCGCCTTCGTGGATGGCTCT
AAGAACGGTGGGGACAAGCACGGGGCCAACAGCCTGAAGATCACTGAGAA
GGTGTCAGGCCAGCACGTGGAGATCCAGGCCAAGTACATCGGCACCACCA
TCGTGGTGCGCCAGGTGGGCCGCTACCTGACCTTTGCCGTCCGCATGCCA
GAGGAAGTGGTCAATGCTGTGGAGGACTGGGACAGCCAGGGTCTCTACCT
CTGCCTGCGGGGCTGCCCCCTCAACCAGCAGATCGACTTCCAGGCCTTCC
ACACCAATGCTGAGGGCACCGGTGCCCGCAGGCTGGCAGCCGCCAGCCCT
GCACCCACAGCCCCCGAGACCTTCCCATACGAGACAGCCGTGGCCAAGTG
CAAGGAGAAGCTGCCGGTGGAGGACCTGTACTACCAGGCCTGCGTCTTCG
ACCTCCTCACCACGGGCGACGTGAACTTCACACTGGCCGCCTACTACGCG
TTGGAGGATGTCAAGATGCTCCACTCC

[0561] A human RGM-A isoform 3 precursor protein sequence (NCBI Ref Seq NP_064596.2) is as follows:

| (SEQ ID NO: 569) | |
|---|---|
| 1 | MQPPRERLVV TGRAGWMGMG RGAGRSALGF WPTLAFLLCS FPAATSPCKI LKCNSEFWSA |
| 61 | TSGSHAPASD DTPEFCAALR SYALCTRRTA RTCRGDLAYH SAVHGIEDLM SQHNCSKDGP |
| 121 | TSQPRLRTLP PAGDSQERSD SPEICHYEKS FHKHSATPNY THCGLFGDPH LRTFTDRFQT |
| 181 | CKVQGAWPLI DNNYLNVQVT NTPVLPGSAA TATSKLTIIF KNFQECVDQK VYQAEMDELP |
| 241 | AAFVDGSKNG GDKHGANSLK ITEKVSGQHV EIQAKYIGTT IVVRQVGRYL TFAVRMPEEV |
| 301 | VNAVEDWDSQ GLYLCLRGCP LNQQIDFQAF HTNAEGTGAR RLAAASPAPT APETFPYETA |
| 361 | VAKCKEKLPV EDLYYQACVF DLLTTGDVNF TLAAYYALED VKMLHSNKDK LHLYERTRDL |
| 421 | PGRAAAGLPL APRPLLGALV PLLALLPVFC |

[0562] The signal peptide is indicated by solid underline.

[0563] A mature RGM-A isoform 3 sequence is as follows:

(SEQ ID NO: 570)

CKILKCNSEFWSATSGSHAPASDDTPEFCAALRSYALCTRRTARTCRGDL
AYHSAVHGIEDLMSQHNCSKDGPTSQPRLRTLPPAGDSQERSDSPEICHY
EKSFHKHSATPNYTHCGLFGDPHLRTFTDRFQTCKVQGAWPLIDNNYLNV
QVTNTPVLPGSAATATSKLTIIFKNFQECVDQKVYQAEMDELPAAFVDGS
KNGGDKHGANSLKITEKVSGQHVEIQAKYIGTTIVVRQVGRYLTFAVRMP
EEVVNAVEDWDSQGLYLCLRGCPLNQQIDFQAFHTNAEGTGARRLAAASP
APTAPETFPYETAVAKCKEKLPVEDLYYQACVFDLLTTGDVNFTLAAYYA
LEDVKMLHS

[0564] A nucleic acid sequence encoding unprocessed RGM-A isoform 3 precursor protein is shown below (SEQ ID NO: 571), corresponding to nucleotides 283-1632 of NCBI Reference Sequence NM_020211.2. The signal sequence is underlined.

(SEQ ID NO: 571)

ATGCAGCCGCCAAGGGAGAGGCTAGTGGTAACAGGCCGAGCTGGATGGAT
GGGTATGGGGAGAGGGGCAGGACGTTCAGCCCTGGGATTCTGGCCGACCC
TCGCCTTCCTTCTCTGCAGCTTCCCCGCAGCCACCTCCCCGTGCAAGATC
CTCAAGTGCAACTCTGAGTTCTGGAGCGCCACGTCGGGCAGCCACGCCCC
AGCCTCAGACGACACCCCCGAGTTCTGTGCAGCCTTGCGCAGCTACGCCC
TGTGCACGCGGCGGACGGCCCGCACCTGCCGGGGTGACCTGGCCTACCAC
TCGGCCGTCCATGGCATAGAGGACCTCATGAGCCAGCACAACTGCTCCAA
GGATGGCCCCACCTCGCAGCCACGCCTGCGCACGCTCCCACCGGCCGGAG
ACAGCCAGGAGCGCTCGGACAGCCCCGAGATCTGCCATTACGAGAAGAGC
TTTCACAAGCACTCGGCCACCCCCAACTACACGCACTGTGGCCTCTTCGG
GGACCCACACCTCAGGACTTTCACCGACCGCTTCCAGACCTGCAAGGTGC
AGGGCGCCTGGCCGCTCATCGACAATAATTACCTGAACGTGCAGGTCACC
AACACGCCTGTGCTGCCCGGCTCAGCGGCCACTGCCACCAGCAAGCTCAC
CATCATCTTCAAGAACTTCCAGGAGTGTGTGGACCAGAAGGTGTACCAGG
CTGAGATGGACGAGCTCCCGGCCGCCTTCGTGGATGGCTCTAAGAACGGT
GGGGACAAGCACGGGGCCAACAGCCTGAAGATCACTGAGAAGGTGTCAGG
CCAGCACGTGGAGATCCAGGCCAAGTACATCGGCACCACCATCGTGGTGC
GCCAGGTGGGCCGCTACCTGACCTTTGCCGTCCGCATGCCAGAGGAAGTG
GTCAATGCTGTGGAGGACTGGGACAGCCAGGGTCTCTACCTCTGCCTGCG
GGGCTGCCCCCTCAACCAGCAGATCGACTTCCAGGCCTTCCACACCAATG
CTGAGGGCACCGGTGCCCGCAGGCTGGCAGCCGCCAGCCCTGCACCCACA
GCCCCCGAGACCTTCCCATACGAGACAGCCGTGGCCAAGTGCAAGGAGAA
GCTGCCGGTGGAGGACCTGTACTACCAGGCCTGCGTCTTCGACCTCCTCA
CCACGGGCGACGTGAACTTCACACTGGCCGCCTACTACGCGTTGGAGGAT
GTCAAGATGCTCCACTCCAACAAAGACAAACTGCACCTGTATGAGAGGAC
TCGGGACCTGCCAGGCAGGGCGGCTGCGGGGCTGCCCCTGGCCCCCCGGC
CCCTCCTGGGCGCCCTCGTCCCGCTCCTGGCCCTGCTCCCTGTGTTCTGC

[0565] A nucleic acid sequence encoding processed RGM-A isoform 3 is shown below (SEQ ID NO: 572):

(SEQ ID NO: 572)

TGCAAGATCCTCAAGTGCAACTCTGAGTTCTGGAGCGCCACGTCGGGCAG
CCACGCCCCAGCCTCAGACGACACCCCCGAGTTCTGTGCAGCCTTGCGCA
GCTACGCCCTGTGCACGCGGCGGACGGCCCGCACCTGCCGGGGTGACCTG
GCCTACCACTCGGCCGTCCATGGCATAGAGGACCTCATGAGCCAGCACAA
CTGCTCCAAGGATGGCCCCACCTCGCAGCCACGCCTGCGCACGCTCCCAC
CGGCCGGAGACAGCCAGGAGCGCTCGGACAGCCCCGAGATCTGCCATTAC
GAGAAGAGCTTTCACAAGCACTCGGCCACCCCCAACTACACGCACTGTGG
CCTCTTCGGGGACCCACACCTCAGGACTTTCACCGACCGCTTCCAGACCT
GCAAGGTGCAGGGCGCCTGGCCGCTCATCGACAATAATTACCTGAACGTG
CAGGTCACCAACACGCCTGTGCTGCCCGGCTCAGCGGCCACTGCCACCAG
CAAGCTCACCATCATCTTCAAGAACTTCCAGGAGTGTGTGGACCAGAAGG
TGTACCAGGCTGAGATGGACGAGCTCCCGGCCGCCTTCGTGGATGGCTCT
AAGAACGGTGGGGACAAGCACGGGGCCAACAGCCTGAAGATCACTGAGAA
GGTGTCAGGCCAGCACGTGGAGATCCAGGCCAAGTACATCGGCACCACCA
TCGTGGTGCGCCAGGTGGGCCGCTACCTGACCTTTGCCGTCCGCATGCCA
GAGGAAGTGGTCAATGCTGTGGAGGACTGGGACAGCCAGGGTCTCTACCT
CTGCCTGCGGGGCTGCCCCCTCAACCAGCAGATCGACTTCCAGGCCTTCC
ACACCAATGCTGAGGGCACCGGTGCCCGCAGGCTGGCAGCCGCCAGCCCT
GCACCCACAGCCCCCGAGACCTTCCCATACGAGACAGCCGTGGCCAAGTG
CAAGGAGAAGCTGCCGGTGGAGGACCTGTACTACCAGGCCTGCGTCTTCG
ACCTCCTCACCACGGGCGACGTGAACTTCACACTGGCCGCCTACTACGCG
TTGGAGGATGTCAAGATGCTCCACTCC

[0566] In certain embodiments, the disclosure relates to heteromultimers that comprise at least one RGM-A polypeptide, which includes fragments, functional variants, and modified forms thereof. Preferably, RGM-A polypeptides for use in accordance with the disclosure (e.g., heteromultimers comprising a RGM-A polypeptide and uses thereof) are soluble (e.g., an extracellular domain of RGM-A). In other preferred embodiments, RGM-A polypeptides for use in accordance with the disclosure bind to and/or inhibit (antagonize) activity (e.g., Smad signaling) of one or more TGF-beta superfamily ligands. In some embodiments, heteromultimers of the disclosure comprise at least one RGM-A polypeptide that is at least 70%, 75%, 80%, 85%, 90%, 91%, 92%, 93%, 94%, 95%, 96%, 97%, 98%, 99%, or 100% identical to the amino acid sequence of SEQ ID NOs: 561, 562, 565, 566, 569, or 570. In some embodiments, heteromultimers of the disclosure comprise at least one RGM-A polypeptide that is at least 70%, 75%, 80%, 85%, 90%, 91%, 92%, 93%, 94%, 95%, 96%, 97%, 98%, 99%, or 100% identical to a polypeptide that begins at any one of amino acids of 1-177 (e.g., amino acid residues 1, 2, 3, 4, 5, 6, 7, 8, 9, 10, 11, 12, 13, 14, 15, 16, 17, 18, 19, 20, 21, 22, 23, 24, 25, 26, 27, 28, 29, 30, 31, 32, 33, 34, 35, 35, 36, 37, 38, 39, 40, 41, 42, 43, 44, 45, 46, 47, 48, 49, 50, 51, 52, 53, 54, 55, 56, 57, 58, 59, 60, 61, 62, 63, 64, 65, 66, 67, 68, 69, 70, 71, 72, 73, 74, 75, 76, 77, 78, 79, 80, 81, 82, 83, 84, 85, 86, 87, 88, 89, 90, 91, 92, 93, 94, 95, 96, 97, 98, 99, 100, 101, 102, 103, 104, 105, 106, 107, 108, 109, 110, 111, 112, 113, 114, 115, 116, 117, 118, 119, 120, 121, 122, 123, 124, 125, 126, 127, 128, 129, 130, 131, 132, 133, 134, 135, 135, 136, 137, 138, 139, 140, 141, 142, 143, 144, 145, 146, 147, 148, 149, 150, 151, 152, 153, 154, 155, 156, 157, 158, 159, 160, 161, 162, 163, 164, 165, 166, 167, 168, 169, 170, 171, 172, 173, 174, 175, 176, or 177) of SEQ ID NO: 561, and ends at any one of amino acids 430-458 (e.g., amino acid residues 430, 431, 432, 433, 434, 435, 435, 436, 437, 438, 439, 440, 441, 442, 443, 444, 445, 446, 447, 448, 449, 450, 451, 452, 453, 454, 455, 456, 457, or 458) of SEQ ID NO: 561. In some embodiments, heteromultimers of the disclosure comprise of at least one RGM-A polypeptide that is at least 70%, 75%, 80%, 85%, 90%, 91%, 92%, 93%, 94%, 95%, 96%, 97%, 98%, 99%, or 100% identical to amino acids of 1-430 of SEQ ID NO: 561. In some embodiments, heteromultimers of the disclosure comprise of at least one RGM-A polypeptide that is at least 70%, 75%, 80%, 85%, 90%, 91%, 92%, 93%, 94%, 95%, 96%, 97%, 98%, 99%, or 100% identical to amino acids of 1-458 of SEQ ID NO: 561. In some embodiments, heteromultimers of the disclosure comprise of at least one RGM-A polypeptide that is at least 70%, 75%, 80%, 85%, 90%, 91%, 92%, 93%, 94%, 95%, 96%, 97%, 98%, 99%, or 100% identical to amino acids of 177-430 of SEQ ID NO: 561. In some embodiments, heteromultimers of the disclosure comprise of at least one RGM-A polypeptide that is at least 70%, 75%, 80%, 85%, 90%, 91%, 92%, 93%, 94%, 95%, 96%, 97%, 98%, 99%, or 100% identical to amino acids of 177-458 of SEQ ID NO: 561. In some embodiments, heteromultimers of the disclosure comprise of at least one RGM-A polypeptide that is at least 70%, 75%, 80%, 85%, 90%, 91%, 92%, 93%, 94%, 95%, 96%, 97%, 98%, 99%, or 100% identical to amino acids of 56-430 of SEQ ID NO: 561. In some embodiments, heteromultimers of the disclosure comprise of at least one RGM-A polypeptide that is at least 70%, 75%, 80%, 85%, 90%, 91%, 92%, 93%, 94%, 95%, 96%, 97%, 98%, 99%, or 100% identical to amino acids of 56-458 of SEQ ID NO: 561. In some embodiments, heteromultimers of the disclosure comprise at least one RGM-A polypeptide that is at least 70%, 75%, 80%, 85%, 90%, 91%, 92%, 93%, 94%, 95%, 96%, 97%, 98%, 99%, or 100% identical to a polypeptide that begins at any one of amino acids of 1-153 (e.g., amino acid residues 1, 2, 3, 4, 5, 6, 7, 8, 9, 10, 11, 12, 13, 14, 15, 16, 17, 18, 19, 20, 21, 22, 23, 24, 25, 26, 27, 28, 29, 30, 31, 32, 33, 34, 35, 35, 36, 37, 38, 39, 40, 41, 42, 43, 44, 45, 46, 47, 48, 49, 50, 51, 52, 53, 54, 55, 56, 57, 58, 59, 60, 61, 62, 63, 64, 65, 66, 67, 68, 69, 70, 71, 72, 73, 74, 75, 76, 77, 78, 79, 80, 81, 82, 83, 84, 85, 86, 87, 88, 89, 90, 91, 92, 93, 94, 95, 96, 97, 98, 99, 100, 101, 102, 103, 104, 105, 106, 107, 108, 109, 110, 111, 112, 113, 114, 115, 116, 117, 118, 119, 120, 121, 122, 123, 124, 125, 126, 127, 128, 129, 130, 131, 132, 133, 134, 135, 135, 136, 137, 138, 139, 140, 141, 142, 143, 144, 145, 146, 147, 148, 149, 150, 151, 152, or 153) of SEQ ID NO: 565, and ends at any one of amino acids 406-434 (e.g., amino acid residues 406, 407, 408, 409, 410, 411, 412, 413, 414, 415, 416, 417, 418, 419, 420, 421, 422, 423, 424, 425, 426, 427, 428, 429, 430, 431, 432, 433, 434) of SEQ ID NO: 565. In some embodiments, heteromultimers of the disclosure comprise of at least one RGM-A polypeptide that is at least 70%, 75%, 80%, 85%, 90%, 91%, 92%, 93%, 94%, 95%, 96%, 97%, 98%, 99%, or 100% identical to amino acids of 1-406 of SEQ ID NO: 565. In some embodiments, heteromultimers of the disclosure comprise of at least one RGM-A polypeptide that is at least 70%, 75%, 80%, 85%, 90%, 91%, 92%, 93%, 94%, 95%, 96%, 97%, 98%, 99%, or 100% identical to amino acids of 153-406 of SEQ ID NO: 565. In some embodiments, heteromultimers of the disclosure comprise of at least one RGM-A polypeptide that is at least 70%, 75%, 80%, 85%, 90%, 91%, 92%, 93%, 94%, 95%, 96%, 97%, 98%, 99%, or 100% identical to amino acids of 1-434 of SEQ ID NO: 565. In some embodiments, heteromultimers of the disclosure comprise of at least one RGM-A polypeptide that is at least 70%, 75%, 80%, 85%, 90%, 91%, 92%, 93%, 94%, 95%, 96%, 97%, 98%, 99%, or 100% identical to amino acids of 153-434 of SEQ ID NO: 565. In some embodiments, heteromultimers of the disclosure comprise of at least one RGM-A polypeptide that is at least 70%, 75%, 80%, 85%, 90%, 91%, 92%, 93%, 94%, 95%, 96%, 97%, 98%, 99%, or 100% identical to amino acids of 32-406 of SEQ ID NO: 565. In some embodiments, heteromultimers of the disclosure comprise of at least one RGM-A polypeptide that is at least 70%, 75%, 80%, 85%, 90%, 91%, 92%, 93%, 94%, 95%, 96%, 97%, 98%, 99%, or 100% identical to amino acids of 32-434 of SEQ ID NO: 565. In some embodiments, heteromultimers of the disclosure comprise at least one RGM-A polypeptide that is at least 70%, 75%, 80%, 85%, 90%, 91%, 92%, 93%, 94%, 95%, 96%, 97%, 98%, 99%, or 100% identical to a polypeptide that begins at any one of amino acids of 1-169 (e.g., amino acid residues 1, 2, 3, 4, 5, 6, 7, 8, 9, 10, 11, 12, 13, 14, 15, 16, 17, 18, 19, 20, 21, 22, 23, 24, 25, 26, 27, 28, 29, 30, 31, 32, 33, 34, 35, 35, 36, 37, 38, 39, 40, 41, 42, 43, 44, 45, 46, 47, 48, 49, 50, 51, 52, 53, 54, 55, 56, 57, 58, 59, 60, 61, 62, 63, 64, 65, 66, 67, 68, 69, 70, 71, 72, 73, 74, 75, 76, 77, 78, 79, 80, 81, 82, 83, 84, 85, 86, 87, 88, 89, 90, 91, 92, 93, 94, 95, 96, 97, 98, 99, 100, 101, 102, 103, 104, 105, 106, 107, 108, 109, 110, 111, 112, 113, 114, 115, 116, 117, 118, 119, 120, 121, 122, 123, 124, 125, 126, 127, 128, 129, 130, 131, 132, 133, 134, 135, 135, 136, 137, 138, 139, 140, 141, 142, 143, 144, 145, 146, 147, 148, 149, 150, 151, 152, 153, 154, 155, 156, 157, 158, 159, 160, 161, 162, 163, 164, 165, 166, 167, 168, 169) of SEQ ID NO: 569, and ends at any one of amino acids 422-450 (e.g., amino acid residues 422, 423, 424, 425, 426, 427, 428, 429, 430, 431, 432, 433, 434, 435, 435, 436, 437, 438, 439, 440, 441, 442, 443, 444, 445, 446, 447, 448, 449, 450) of SEQ ID NO: 569. In some embodiments, heteromultimers of the disclosure comprise of at least one RGM-A polypeptide that is at least 70%, 75%, 80%, 85%, 90%, 91%, 92%, 93%, 94%, 95%, 96%, 97%, 98%, 99%, or 100% identical to amino acids of 1-422 of SEQ ID NO: 569. In some embodiments, heteromultimers of the disclosure comprise of at least one RGM-A polypeptide that is at least 70%, 75%, 80%, 85%, 90%, 91%, 92%, 93%, 94%, 95%, 96%, 97%, 98%, 99%, or 100% identical to amino acids of 169-422 of SEQ ID NO: 569. In some embodiments, heteromultimers of the disclosure comprise of at least one RGM-A polypeptide that is at least 70%, 75%, 80%, 85%, 90%, 91%, 92%, 93%, 94%, 95%, 96%, 97%, 98%, 99%, or 100% identical to amino acids of 1-450 of SEQ ID NO: 569. In some embodiments, heteromultimers of the disclosure comprise of at least one RGM-A polypeptide that is at least 70%, 75%, 80%, 85%, 90%, 91%, 92%, 93%, 94%, 95%, 96%, 97%, 98%, 99%, or 100% identical to amino acids of 169-450 of SEQ ID NO: 569. In some embodiments, heteromultimers of the disclosure comprise of at least one RGM-A polypeptide that is at least 70%, 75%, 80%, 85%, 90%, 91%, 92%, 93%, 94%, 95%, 96%, 97%, 98%, 99%, or 100% identical to amino acids of 48-422 of SEQ ID NO: 569. In some embodiments, heteromultimers of the disclosure comprise of at least one RGM-A polypeptide that is at least 70%, 75%, 80%, 85%, 90%, 91%, 92%, 93%, 94%, 95%, 96%, 97%, 98%, 99%, or 100% identical to amino acids of 48-450 of SEQ ID NO: 569. In some embodiments, heteromultimers of the disclosure comprise at least one RGM-A polypeptide that is at least 70%, 75%, 80%, 85%, 90%, 91%, 92%, 93%, 94%, 95%, 96%, 97%, 98%, 99%, or 100% identical to a polypeptide that begins at any one of amino acids of 56-61 (e.g., amino acid residues 56, 57, 58, 59, 60, or 61) of SEQ ID NO: 561, and ends at any one of amino acids 366-458 (e.g., amino acid residues 366, 367, 368, 369, 370, 371, 372, 373, 374, 375, 376, 377, 378, 379, 380, 381, 382, 383, 384, 385, 386, 387, 388, 389, 390, 391, 392, 393, 394, 395, 396, 397, 398, 399, 400, 401, 402, 403, 404, 405, 406, 407, 408, 409, 410, 411, 412, 413, 414, 415, 416, 417, 418, 419, 420, 421, 422, 423, 424, 425, 426, 427, 428, 429, 430, 431, 432, 433, 434, 435, 436, 437, 438, 439, 440, 441, 442, 443, 444, 445, 446, 447, 448, 449, 450, 451, 452, 453, 454, 455, 456, 457, or 458) of SEQ ID NO: 561. In some embodiments, heteromultimers of the disclosure comprise of at least one RGM-A polypeptide that is at least 70%, 75%, 80%, 85%, 90%, 91%, 92%, 93%, 94%, 95%, 96%, 97%, 98%, 99%, or 100% identical to amino acids of 56-458 of SEQ ID NO: 561. In some embodiments, heteromultimers of the disclosure comprise of at least one RGM-A polypeptide that is at least 70%, 75%, 80%, 85%, 90%, 91%, 92%, 93%, 94%, 95%, 96%, 97%, 98%, 99%, or 100% identical to amino acids of 61-366 of SEQ ID NO: 561. In some embodiments, heteromultimers of the disclosure comprise at least one RGM-A polypeptide that is at least 70%, 75%, 80%, 85%, 90%, 91%, 92%, 93%, 94%, 95%, 96%, 97%, 98%, 99%, or 100% identical to a polypeptide that begins at any one of amino acids of 32-37 (e.g., amino acid residues 32, 33, 34, 35, 36, or 37) of SEQ ID NO: 565, and ends at any one of amino acids 362-434 (e.g., amino acid residues 362, 363, 364, 365, 366, 367, 368, 369, 370, 371, 372, 373, 374, 375, 376, 377, 378, 379, 380, 381, 382, 383, 384, 385, 386, 387, 388, 389, 390, 391, 392, 393, 394, 395, 396, 397, 398, 399, 400, 401, 402, 403, 404, 405, 406, 407, 408, 409, 410, 411, 412, 413, 414, 415, 416, 417, 418, 419, 420, 421, 422, 423, 424, 425, 426, 427, 428, 429, 430, 431, 432, 433, or 434) of SEQ ID NO: 565. In some embodiments, heteromultimers of the disclosure comprise of at least one RGM-A polypeptide that is at least 70%, 75%, 80%, 85%, 90%, 91%, 92%, 93%, 94%, 95%, 96%, 97%, 98%, 99%, or 100% identical to amino acids of 32-434 of SEQ ID NO: 565. In some embodiments, heteromultimers of the disclosure comprise of at least one RGM-A polypeptide that is at least 70%, 75%, 80%, 85%, 90%, 91%, 92%, 93%, 94%, 95%, 96%, 97%, 98%, 99%, or 100% identical to amino acids of 37-362 of SEQ ID NO: 565. In some embodiments, heteromultimers of the disclosure comprise at least one RGM-A polypeptide that is at least 70%, 75%, 80%, 85%, 90%, 91%, 92%, 93%, 94%, 95%, 96%, 97%, 98%, 99%, or 100% identical to a polypeptide that begins at any one of amino acids of 48-53 (e.g., amino acid residues 48, 49, 50, 51, 52, or 53) of SEQ ID NO: 569, and ends at any one of amino acids 378-450 (e.g., amino acid residues 378, 379, 380, 381, 382, 383, 384, 385, 386, 387, 388, 389, 390, 391, 392, 393, 394, 395, 396, 397, 398, 399, 400, 401, 402, 403, 404, 405, 406, 407, 408, 409, 410, 411, 412, 413, 414, 415, 416, 417, 418, 419, 420, 421, 422, 423, 424, 425, 426, 427, 428, 429, 430, 431, 432, 433, 434, 435, 436, 437, 438, 439, 440, 441, 442, 443, 444, 445, 446, 447, 448, 449, 450) of SEQ ID NO: 569. In some embodiments, heteromultimers of the disclosure comprise of at least one RGM-A polypeptide that is at least 70%, 75%, 80%, 85%, 90%, 91%, 92%, 93%, 94%, 95%, 96%, 97%, 98%, 99%, or 100% identical to amino acids of 48-450 of SEQ ID NO: 569. In some embodiments, heteromultimers of the disclosure comprise of at least one RGM-A polypeptide that is at least 70%, 75%, 80%, 85%, 90%, 91%, 92%, 93%, 94%, 95%, 96%, 97%, 98%, 99%, or 100% identical to amino acids of 53-378 of SEQ ID NO: 569.

[0567] The term “hemojuvelin polypeptide” includes polypeptides comprising any naturally occurring hemojuvelin protein (encoded by HFE2 or one of its nonhuman orthologs) as well as any variants thereof (including mutants, fragments, fusions, and peptidomimetic forms) that retain a useful activity.

[0568] The human hemojuvelin isoform A precursor protein sequence (NCBI Ref Seq NP_998818.1) is as follows:

| (SEQ ID NO: 573) | |
|---|---|
| 1 | MGEPGQSPSP RSSHGSPPTL STLTLLLLLC GHAHSQCKIL RCNAEYVSST LSLRGGGSSG |
| 61 | ALRGGGGGGR GGGVGSGGLC RALRSYALCT RRTARTCRGD LAFHSAVHGI EDLMIQHNCS |
| 121 | RQGPTAPPPP RGPALPGAGS GLPAPDPCDY EGRFSRLHGR PPGFLHCASF GDPHVRSFHH |
| 181 | HFHTCRVQGA WPLLDNDFLF VQATSSPMAL GANATATRKL TIIFKNMQEC IDQKVYQAEV |
| 241 | DNLPVAFEDG SINGGDRPGG SSLSIQTANP GNHVEIQAAY IGTTIIIRQT AGQLSFSIKV |
| 301 | AEDVAMAFSA EQDLQLCVGG CPPSQRLSRS ERNRRGAITI DTARRLCKEG LPVEDAYFHS |
| 361 | CVFDVLISGD PNFTVAAQAA LEDARAFLPD LEKLHLFPSD AGVPLSSATL LAPLLSGLFV |
| 421 | LWLCIQ |

[0569] The signal peptide is indicated by single underline.

[0570] A processed hemojuvelin isoform A polypeptide sequence is as follows:

(SEQ ID NO: 574)

QCKILRCNAEYVSSTLSLRGGGSSGALRGGGGGGRGGGVGSGGLCRALRS
YALCTRRTARTCRGDLAFHSAVHGIEDLMIQHNCSRQGPTAPPPPRGPAL
PGAGSGLPAPDPCDYEGRFSRLHGRPPGFLHCASFGDPHVRSFHHHFHTC
RVQGAWPLLDNDFLFVQATSSPMALGANATATRKLTIIFKNMQECIDQKV
YQAEVDNLPVAFEDGSINGGDRPGGSSLSIQTANPGNHVEIQAAYIGTTI
IIRQTAGQLSFSIKVAEDVAMAFSAEQDLQLCVGGCPPSQRLSRSERNRR
GAITIDTARRLCKEGLPVEDAYFHSCVFDVLISGDPNFTVAAQAALEDAR
AFLPDLEKLHLFPSD

[0571] A nucleic acid sequence encoding unprocessed human hemojuvelin isoform A precursor protein is shown below (SEQ ID NO: 575), corresponding to nucleotides 326-1603 of NCBI Reference Sequence NM_213653.3. The signal sequence is underlined.

(SEQ ID NO: 575)

ATGGGGGAGCCAGGCCAGTCCCCTAGTCCCAGGTCCTCCCATGGCAGTCC
CCCAACTCTAAGCACTCTCACTCTCCTGCTGCTCCTCTGTGGACATGCTC
ATTCTCAATGCAAGATCCTCCGCTGCAATGCTGAGTACGTATCGTCCACT
CTGAGCCTTAGAGGTGGGGGTTCATCAGGAGCACTTCGAGGAGGAGGAGG
AGGAGGCCGGGGTGGAGGGGTGGGCTCTGGCGGCCTCTGTCGAGCCCTCC
GCTCCTATGCGCTCTGCACTCGGCGCACCGCCCGCACCTGCCGCGGGGAC
CTCGCCTTCCATTCGGCGGTACATGGCATCGAAGACCTGATGATCCAGCA
CAACTGCTCCCGCCAGGGCCCTACAGCCCCTCCCCCGCCCCGGGGCCCCG
CCCTTCCAGGCGCGGGCTCCGGCCTCCCTGCCCCGGACCCTTGTGACTAT
GAAGGCCGGTTTTCCCGGCTGCATGGTCGTCCCCCGGGGTTCTTGCATTG
CGCTTCCTTCGGGGACCCCCATGTGCGCAGCTTCCACCATCACTTTCACA
CATGCCGTGTCCAAGGAGCTTGGCCTCTACTGGATAATGACTTCCTCTTT
GTCCAAGCCACCAGCTCCCCCATGGCGTTGGGGGCCAACGCTACCGCCAC
CCGGAAGCTCACCATCATATTTAAGAACATGCAGGAATGCATTGATCAGA
AGGTGTATCAGGCTGAGGTGGATAATCTTCCTGTAGCCTTTGAAGATGGT
TCTATCAATGGAGGTGACCGACCTGGGGGATCCAGTTTGTCGATTCAAAC
TGCTAACCCTGGGAACCATGTGGAGATCCAAGCTGCCTACATTGGCACAA
CTATAATCATTCGGCAGACAGCTGGGCAGCTCTCCTTCTCCATCAAGGTA
GCAGAGGATGTGGCCATGGCCTTCTCAGCTGAACAGGACCTGCAGCTCTG
TGTTGGGGGGTGCCCTCCAAGTCAGCGACTCTCTCGATCAGAGCGCAATC
GTCGGGGAGCTATAACCATTGATACTGCCAGACGGCTGTGCAAGGAAGGG
CTTCCAGTGGAAGATGCTTACTTCCATTCCTGTGTCTTTGATGTTTTAAT
TTCTGGTGATCCCAACTTTACCGTGGCAGCTCAGGCAGCACTGGAGGATG
CCCGAGCCTTCCTGCCAGACTTAGAGAAGCTGCATCTCTTCCCCTCAGAT
GCTGGGGTTCCTCTTTCCTCAGCAACCCTCTTAGCTCCACTCCTTTCTGG
GCTCTTTGTTCTGTGGCTTTGCATTCAG

[0572] A nucleic acid sequence encoding a processed hemojuvelin isoform A is shown below (SEQ ID NO: 576):

(SEQ ID NO: 576)

CAATGCAAGATCCTCCGCTGCAATGCTGAGTACGTATCGTCCACTCTGAG
CCTTAGAGGTGGGGGTTCATCAGGAGCACTTCGAGGAGGAGGAGGAGGAG
GCCGGGGTGGAGGGGTGGGCTCTGGCGGCCTCTGTCGAGCCCTCCGCTCC
TATGCGCTCTGCACTCGGCGCACCGCCCGCACCTGCCGCGGGGACCTCGC
CTTCCATTCGGCGGTACATGGCATCGAAGACCTGATGATCCAGCACAACT
GCTCCCGCCAGGGCCCTACAGCCCCTCCCCCGCCCCGGGGCCCCGCCCTT
CCAGGCGCGGGCTCCGGCCTCCCTGCCCCGGACCCTTGTGACTATGAAGG
CCGGTTTTCCCGGCTGCATGGTCGTCCCCCGGGGTTCTTGCATTGCGCTT
CCTTCGGGGACCCCCATGTGCGCAGCTTCCACCATCACTTTCACACATGC
CGTGTCCAAGGAGCTTGGCCTCTACTGGATAATGACTTCCTCTTTGTCCA
AGCCACCAGCTCCCCCATGGCGTTGGGGGCCAACGCTACCGCCACCCGGA
AGCTCACCATCATATTTAAGAACATGCAGGAATGCATTGATCAGAAGGTG
TATCAGGCTGAGGTGGATAATCTTCCTGTAGCCTTTGAAGATGGTTCTAT
CAATGGAGGTGACCGACCTGGGGGATCCAGTTTGTCGATTCAAACTGCTA
ACCCTGGGAACCATGTGGAGATCCAAGCTGCCTACATTGGCACAACTATA
ATCATTCGGCAGACAGCTGGGCAGCTCTCCTTCTCCATCAAGGTAGCAGA
GGATGTGGCCATGGCCTTCTCAGCTGAACAGGACCTGCAGCTCTGTGTTG
GGGGGTGCCCTCCAAGTCAGCGACTCTCTCGATCAGAGCGCAATCGTCGG
GGAGCTATAACCATTGATACTGCCAGACGGCTGTGCAAGGAAGGGCTTCC
AGTGGAAGATGCTTACTTCCATTCCTGTGTCTTTGATGTTTTAATTTCTG
GTGATCCCAACTTTACCGTGGCAGCTCAGGCAGCACTGGAGGATGCCCGA
GCCTTCCTGCCAGACTTAGAGAAGCTGCATCTCTTCCCCTCAGAT

[0573] A human hemojuvelin isoform B protein sequence (NCBI Ref Seq NP_660320.3) is as follows:

| (SEQ ID NO: 577) | |
|---|---|
| 1 | MIQHNCSRQG PTAPPPPRGP ALPGAGSGLP APDPCDYEGR FSRLHGRPPG FLHCASFGDP |
| 61 | HVRSFHHHFH TCRVQGAWPL LDNDFLFVQA TSSPMALGAN ATATRKLTII FKNMQECIDQ |
| 121 | KVYQAEVDNL PVAFEDGSIN GGDRPGGSSL SIQTANPGNH VEIQAAYIGT TIIIRQTAGQ |
| 181 | LSFSIKVAED VAMAFSAEQD LQLCVGGCPP SQRLSRSERN RRGAITIDTA RRLCKEGLPV |
| 241 | EDAYFHSCVF DVLISGDPNF TVAAQAALED ARAFLPDLEK LHLFPSDAGV PLSSATLLAP |
| 301 | LLSGLFVLWL CIQ |

[0574] A processed hemojuvelin isoform B polypeptide sequence is as follows:

(SEQ ID NO: 578)

MIQHNCSRQGPTAPPPPRGPALPGAGSGLPAPDPCDYEGRFSRLHGRPPG
FLHCASFGDPHVRSFHHHFHTCRVQGAWPLLDNDFLFVQATSSPMALGAN
ATATRKLTIIFKNMQECIDQKVYQAEVDNLPVAFEDGSINGGDRPGGSSL
SIQTANPGNHVEIQAAYIGTTIIIRQTAGQLSFSIKVAEDVAMAFSAEQD
LQLCVGGCPPSQRLSRSERNRRGAITIDTARRLCKEGLPVEDAYFHSCVF
DVLISGDPNFTVAAQAALEDARAFLPDLEKLHLFPSD

[0575] A nucleic acid sequence encoding human hemojuvelin isoform B precursor protein is shown below (SEQ ID NO: 579), corresponding to nucleotides 479-1417 of NCBI Reference Sequence NM_145277.4.

(SEQ ID NO: 579)

ATGATCCAGCACAACTGCTCCCGCCAGGGCCCTACAGCCCCTCCCCCGCC
CCGGGGCCCCGCCCTTCCAGGCGCGGGCTCCGGCCTCCCTGCCCCGGACC
CTTGTGACTATGAAGGCCGGTTTTCCCGGCTGCATGGTCGTCCCCCGGGG
TTCTTGCATTGCGCTTCCTTCGGGGACCCCCATGTGCGCAGCTTCCACCA
TCACTTTCACACATGCCGTGTCCAAGGAGCTTGGCCTCTACTGGATAATG
ACTTCCTCTTTGTCCAAGCCACCAGCTCCCCCATGGCGTTGGGGGCCAAC
GCTACCGCCACCCGGAAGCTCACCATCATATTTAAGAACATGCAGGAATG
CATTGATCAGAAGGTGTATCAGGCTGAGGTGGATAATCTTCCTGTAGCCT
TTGAAGATGGTTCTATCAATGGAGGTGACCGACCTGGGGGATCCAGTTTG
TCGATTCAAACTGCTAACCCTGGGAACCATGTGGAGATCCAAGCTGCCTA
CATTGGCACAACTATAATCATTCGGCAGACAGCTGGGCAGCTCTCCTTCT
CCATCAAGGTAGCAGAGGATGTGGCCATGGCCTTCTCAGCTGAACAGGAC
CTGCAGCTCTGTGTTGGGGGGTGCCCTCCAAGTCAGCGACTCTCTCGATC
AGAGCGCAATCGTCGGGGAGCTATAACCATTGATACTGCCAGACGGCTGT
GCAAGGAAGGGCTTCCAGTGGAAGATGCTTACTTCCATTCCTGTGTCTTT
GATGTTTTAATTTCTGGTGATCCCAACTTTACCGTGGCAGCTCAGGCAGC
ACTGGAGGATGCCCGAGCCTTCCTGCCAGACTTAGAGAAGCTGCATCTCT
TCCCCTCAGATGCTGGGGTTCCTCTTTCCTCAGCAACCCTCTTAGCTCCA
CTCCTTTCTGGGCTCTTTGTTCTGTGGCTTTGCATTCAG

[0576] A nucleic acid sequence encoding a processed hemojuvelin isoform B is shown below (SEQ ID NO: 580):

(SEQ ID NO: 580)

ATGATCCAGCACAACTGCTCCCGCCAGGGCCCTACAGCCCCTCCCCCGCC
CCGGGGCCCCGCCCTTCCAGGCGCGGGCTCCGGCCTCCCTGCCCCGGACC
CTTGTGACTATGAAGGCCGGTTTTCCCGGCTGCATGGTCGTCCCCCGGGG
TTCTTGCATTGCGCTTCCTTCGGGGACCCCCATGTGCGCAGCTTCCACCA
TCACTTTCACACATGCCGTGTCCAAGGAGCTTGGCCTCTACTGGATAATG
ACTTCCTCTTTGTCCAAGCCACCAGCTCCCCCATGGCGTTGGGGGCCAAC
GCTACCGCCACCCGGAAGCTCACCATCATATTTAAGAACATGCAGGAATG
CATTGATCAGAAGGTGTATCAGGCTGAGGTGGATAATCTTCCTGTAGCCT
TTGAAGATGGTTCTATCAATGGAGGTGACCGACCTGGGGGATCCAGTTTG
TCGATTCAAACTGCTAACCCTGGGAACCATGTGGAGATCCAAGCTGCCTA
CATTGGCACAACTATAATCATTCGGCAGACAGCTGGGCAGCTCTCCTTCT
CCATCAAGGTAGCAGAGGATGTGGCCATGGCCTTCTCAGCTGAACAGGAC
CTGCAGCTCTGTGTTGGGGGGTGCCCTCCAAGTCAGCGACTCTCTCGATC
AGAGCGCAATCGTCGGGGAGCTATAACCATTGATACTGCCAGACGGCTGT
GCAAGGAAGGGCTTCCAGTGGAAGATGCTTACTTCCATTCCTGTGTCTTT
GATGTTTTAATTTCTGGTGATCCCAACTTTACCGTGGCAGCTCAGGCAGC
ACTGGAGGATGCCCGAGCCTTCCTGCCAGACTTAGAGAAGCTGCATCTCT
TCCCCTCAGAT

[0577] A human hemojuvelin isoform C protein sequence (NCBI Ref Seq NP_973733.1) is as follows:

| (SEQ ID NO: 581) | |
|---|---|
| 1 | MQECIDQKVY QAEVDNLPVA FEDGSINGGD RPGGSSLSIQ TANPGNHVEI QAAYIGTTII |
| 61 | IRQTAGQLSF SIKVAEDVAM AFSAEQDLQL CVGGCPPSQR LSRSERNRRG AITIDTARRL |
| 121 | CKEGLPVEDA YFHSCVFDVL ISGDPNFTVA AQAALEDARA FLPDLEKLHL FPSD |

[0578] A processed hemojuvelin isoform C polypeptide sequence is as follows:

(SEQ ID NO: 582)
MQECIDQKVYQAEVDNLPVAFEDGSINGGDRPGGSSLSIQTANPGNHVEI
QAAYIGTTIIIRQTAGQLSFSIKVAEDVAMAFSAEQDLQLCVGGCPPSQR
LSRSERNRRGAITIDTARRLCKEGLPVEDAYFHSCVFDVLISGDPNFTVA
AQAALEDARAFLPDLEKLHLFPSD

[0579] A nucleic acid sequence encoding human hemojuvelin isoform C protein is shown below (SEQ ID NO: 583), corresponding to nucleotides 295-894 of NCBI Reference Sequence NM_202004.3.

(SEQ ID NO: 583)
ATGCAGGAATGCATTGATCAGAAGGTGTATCAGGCTGAGGTGGATAATCT
TCCTGTAGCCTTTGAAGATGGTTCTATCAATGGAGGTGACCGACCTGGGG
GATCCAGTTTGTCGATTCAAACTGCTAACCCTGGGAACCATGTGGAGATC
CAAGCTGCCTACATTGGCACAACTATAATCATTCGGCAGACAGCTGGGCA
GCTCTCCTTCTCCATCAAGGTAGCAGAGGATGTGGCCATGGCCTTCTCAG
CTGAACAGGACCTGCAGCTCTGTGTTGGGGGGTGCCCTCCAAGTCAGCGA
CTCTCTCGATCAGAGCGCAATCGTCGGGGAGCTATAACCATTGATACTGC
CAGACGGCTGTGCAAGGAAGGGCTTCCAGTGGAAGATGCTTACTTCCATT
CCTGTGTCTTTGATGTTTTAATTTCTGGTGATCCCAACTTTACCGTGGCA
GCTCAGGCAGCACTGGAGGATGCCCGAGCCTTCCTGCCAGACTTAGAGAA
GCTGCATCTCTTCCCCTCAGATGCTGGGGTTCCTCTTTCCTCAGCAACCC
TCTTAGCTCCACTCCTTTCTGGGCTCTTTGTTCTGTGGCTTTGCATTCAG

[0580] A nucleic acid sequence encoding a processed hemojuvelin isoform C is shown below (SEQ ID NO: 584):

(SEQ ID NO: 584)
ATGCAGGAATGCATTGATCAGAAGGTGTATCAGGCTGAGGTGGATAATCT
TCCTGTAGCCTTTGAAGATGGTTCTATCAATGGAGGTGACCGACCTGGGG
GATCCAGTTTGTCGATTCAAACTGCTAACCCTGGGAACCATGTGGAGATC
CAAGCTGCCTACATTGGCACAACTATAATCATTCGGCAGACAGCTGGGCA
GCTCTCCTTCTCCATCAAGGTAGCAGAGGATGTGGCCATGGCCTTCTCAG
CTGAACAGGACCTGCAGCTCTGTGTTGGGGGGTGCCCTCCAAGTCAGCGA
CTCTCTCGATCAGAGCGCAATCGTCGGGGAGCTATAACCATTGATACTGC
CAGACGGCTGTGCAAGGAAGGGCTTCCAGTGGAAGATGCTTACTTCCATT
CCTGTGTCTTTGATGTTTTAATTTCTGGTGATCCCAACTTTACCGTGGCA
GCTCAGGCAGCACTGGAGGATGCCCGAGCCTTCCTGCCAGACTTAGAGAA
GCTGCATCTCTTCCCCTCAGAT

[0581] In certain embodiments, the disclosure relates to heteromultimers that comprise at least one hemojuvelin polypeptide, which includes fragments, functional variants, and modified forms thereof. Preferably, hemojuvelin polypeptides for use in accordance with the disclosure (e.g., heteromultimers comprising a hemojuvelin polypeptide and uses thereof) are soluble (e.g., an extracellular domain of hemojuvelin). In other preferred embodiments, hemojuvelin polypeptides for use in accordance with disclosure bind to and/or inhibit (antagonize) activity (e.g., Smad signaling) of one or more TGF-beta superfamily ligands. In some embodiments, heteromultimers of the disclosure comprise at least one hemojuvelin polypeptide that is at least 70%, 75%, 80%, 85%, 90%, 91%, 92%, 93%, 94%, 95%, 96%, 97%, 98%, 99%, or 100% identical to the amino acid sequence of SEQ ID NOs: 573, 574, 577, 578, 581, or 582. In some embodiments, heteromultimers of the disclosure comprise at least one hemojuvelin polypeptide that is at least 70%, 75%, 80%, 85%, 90%, 91%, 92%, 93%, 94%, 95%, 96%, 97%, 98%, 99%, or 100% identical to a polypeptide that begins at any one of amino acids of 1-36 (e.g., amino acid residues 1, 2, 3, 4, 5, 6, 7, 8, 9, 10, 11, 12, 13, 14, 15, 16, 17, 18, 19, 20, 21, 22, 23, 24, 25, 26, 27, 28, 29, 30, 31, 32, 33, 34, 35, 35, or 36) of SEQ ID NO: 573, and ends at any one of amino acids 400-426 (e.g., amino acid residues 400, 401, 402, 403, 404, 405, 406, 407, 408, 409, 410, 411, 412, 413, 414, 415, 416, 417, 418, 419, 420, 421, 422, 423, 424, 425, or 426) of SEQ ID NO: 573. In some embodiments, heteromultimers of the disclosure comprise at least one hemojuvelin polypeptide that is at least 70%, 75%, 80%, 85%, 90%, 91%, 92%, 93%, 94%, 95%, 96%, 97%, 98%, 99%, or 100% identical to a polypeptide that begins at any one of amino acids of 36-42 (e.g., amino acid residues 36, 37, 38, 39, 40, 41, or 42) of SEQ ID NO: 573, and ends at any one of amino acids 167-172 (e.g., amino acid residues 167, 168, 169, 170, 171, or 172) of SEQ ID NO: 573. In some embodiments, heteromultimers of the disclosure comprise at least one hemojuvelin polypeptide that is at least 70%, 75%, 80%, 85%, 90%, 91%, 92%, 93%, 94%, 95%, 96%, 97%, 98%, 99%, or 100% identical to a polypeptide that begins at any one of amino acids of 173-185 (e.g., amino acid residues 173, 174, 175, 176, 177, 178, 179, 180, 181, 182, 183, 184, or 185) of SEQ ID NO: 573, and ends at any one of amino acids 361-400 (e.g., amino acid residues 361, 362, 363, 364, 365, 366, 367, 368, 369, 370, 371, 372, 373, 374, 375, 376, 377, 378, 379, 380, 381, 382, 383, 384, 385, 386, 387, 388, 389, 390, 391, 392, 393, 394, 395, 396, 397, 398, 399, 400) of SEQ ID NO: 573. In some embodiments, heteromultimers of the disclosure comprise of at least one hemojuvelin polypeptide that is at least 70%, 75%, 80%, 85%, 90%, 91%, 92%, 93%, 94%, 95%, 96%, 97%, 98%, 99%, or 100% identical to amino acids of 1-400 of SEQ ID NO: 573. In some embodiments, heteromultimers of the disclosure comprise of at least one hemojuvelin polypeptide that is at least 70%, 75%, 80%, 85%, 90%, 91%, 92%, 93%, 94%, 95%, 96%, 97%, 98%, 99%, or 100% identical to amino acids of 1-426 of SEQ ID NO: 573. In some embodiments, heteromultimers of the disclosure comprise of at least one hemojuvelin polypeptide that is at least 70%, 75%, 80%, 85%, 90%, 91%, 92%, 93%, 94%, 95%, 96%, 97%, 98%, 99%, or 100% identical to amino acids of 36-400 of SEQ ID NO: 573. In some embodiments, heteromultimers of the disclosure comprise of at least one hemojuvelin polypeptide that is at least 70%, 75%, 80%, 85%, 90%, 91%, 92%, 93%, 94%, 95%, 96%, 97%, 98%, 99%, or 100% identical to amino acids of 36-426 of SEQ ID NO: 573. In some embodiments, heteromultimers of the disclosure comprise of at least one hemojuvelin polypeptide that is at least 70%, 75%, 80%, 85%, 90%, 91%, 92%, 93%, 94%, 95%, 96%, 97%, 98%, 99%, or 100% identical to amino acids of 36-167 of SEQ ID NO: 573. In some embodiments, heteromultimers of the disclosure comprise of at least one hemojuvelin polypeptide that is at least 70%, 75%, 80%, 85%, 90%, 91%, 92%, 93%, 94%, 95%, 96%, 97%, 98%, 99%, or 100% identical to amino acids of 36-172 of SEQ ID NO: 573. In some embodiments, heteromultimers of the disclosure comprise of at least one hemojuvelin polypeptide that is at least 70%, 75%, 80%, 85%, 90%, 91%, 92%, 93%, 94%, 95%, 96%, 97%, 98%, 99%, or 100% identical to amino acids of 42-167 of SEQ ID NO: 573. In some embodiments, heteromultimers of the disclosure comprise of at least one hemojuvelin polypeptide that is at least 70%, 75%, 80%, 85%, 90%, 91%, 92%, 93%, 94%, 95%, 96%, 97%, 98%, 99%, or 100% identical to amino acids of 42-172 of SEQ ID NO: 573. In some embodiments, heteromultimers of the disclosure comprise of at least one hemojuvelin polypeptide that is at least 70%, 75%, 80%, 85%, 90%, 91%, 92%, 93%, 94%, 95%, 96%, 97%, 98%, 99%, or 100% identical to amino acids of 173-361 of SEQ ID NO: 573. In some embodiments, heteromultimers of the disclosure comprise of at least one hemojuvelin polypeptide that is at least 70%, 75%, 80%, 85%, 90%, 91%, 92%, 93%, 94%, 95%, 96%, 97%, 98%, 99%, or 100% identical to amino acids of 173-400 of SEQ ID NO: 573. In some embodiments, heteromultimers of the disclosure comprise of at least one hemojuvelin polypeptide that is at least 70%, 75%, 80%, 85%, 90%, 91%, 92%, 93%, 94%, 95%, 96%, 97%, 98%, 99%, or 100% identical to amino acids of 185-361 of SEQ ID NO: 573. In some embodiments, heteromultimers of the disclosure comprise of at least one hemojuvelin polypeptide that is at least 70%, 75%, 80%, 85%, 90%, 91%, 92%, 93%, 94%, 95%, 96%, 97%, 98%, 99%, or 100% identical to amino acids of 185-400 of SEQ ID NO: 573. In some embodiments, heteromultimers of the disclosure comprise at least one hemojuvelin protein, wherein the hemojuvelin protein is a dimer comprising a first polypeptide that is at least 70%, 75%, 80%, 85%, 90%, 91%, 92%, 93%, 94%, 95%, 96%, 97%, 98%, 99%, or 100% identical to a polypeptide that begins at any one of amino acids of 36-42 (e.g., amino acid residues 36, 37, 38, 39, 40, 41, or 42) of SEQ ID NO: 573, and ends at any one of amino acids 167-172 (e.g., amino acid residues 167, 168, 169, 170, 171, or 172) of SEQ ID NO: 573, and second polypeptide that is at least 70%, 75%, 80%, 85%, 90%, 91%, 92%, 93%, 94%, 95%, 96%, 97%, 98%, 99%, or 100% identical to a polypeptide that begins at any one of amino acids of 173-185 (e.g., amino acid residues 173, 174, 175, 176, 177, 178, 179, 180, 181, 182, 183, 184, or 185) of SEQ ID NO: 573, and ends at any one of amino acids 361-400 (e.g., amino acid residues 361, 362, 363, 364, 365, 366, 367, 368, 369, 370, 371, 372, 373, 374, 375, 376, 377, 378, 379, 380, 381, 382, 383, 384, 385, 386, 387, 388, 389, 390, 391, 392, 393, 394, 395, 396, 397, 398, 399, 400) of SEQ ID NO: 573. In some embodiments, heteromultimers of the disclosure comprise at least one single chain ligand trap that comprises a first hemojuvelin polypeptide domain that is at least 70%, 75%, 80%, 85%, 90%, 91%, 92%, 93%, 94%, 95%, 96%, 97%, 98%, 99%, or 100% identical to a polypeptide that begins at any one of amino acids of 36-42 (e.g., amino acid residues 36, 37, 38, 39, 40, 41, or 42) of SEQ ID NO: 573, and ends at any one of amino acids 167-172 (e.g., amino acid residues 167, 168, 169, 170, 171, or 172) of SEQ ID NO: 573, and second hemojuvelin polypeptide domain that is at least 70%, 75%, 80%, 85%, 90%, 91%, 92%, 93%, 94%, 95%, 96%, 97%, 98%, 99%, or 100% identical to a polypeptide that begins at any one of amino acids of 173-185 (e.g., amino acid residues 173, 174, 175, 176, 177, 178, 179, 180, 181, 182, 183, 184, or 185) of SEQ ID NO: 573, and ends at any one of amino acids 361-400 (e.g., amino acid residues 361, 362, 363, 364, 365, 366, 367, 368, 369, 370, 371, 372, 373, 374, 375, 376, 377, 378, 379, 380, 381, 382, 383, 384, 385, 386, 387, 388, 389, 390, 391, 392, 393, 394, 395, 396, 397, 398, 399, 400) of SEQ ID NO: 573. In some embodiments, heteromultimers of the disclosure comprise at least one hemojuvelin polypeptide that is at least 70%, 75%, 80%, 85%, 90%, 91%, 92%, 93%, 94%, 95%, 96%, 97%, 98%, 99%, or 100% identical to a polypeptide that begins at any one of amino acids of 1-6 (e.g., amino acid residues 1, 2, 3, 4, 5, or 6) of SEQ ID NO: 577, and ends at any one of amino acids 287-313 (e.g., amino acid residues 287, 288, 289, 300, 301, 302, 303, 304, 305, 306, 307, 308, 309, 310, 311, 312, or 313) of SEQ ID NO: 577. In some embodiments, heteromultimers of the disclosure comprise at least one hemojuvelin polypeptide that is at least 70%, 75%, 80%, 85%, 90%, 91%, 92%, 93%, 94%, 95%, 96%, 97%, 98%, 99%, or 100% identical to a polypeptide that begins at any one of amino acids of 1-6 (e.g., amino acid residues 1, 2, 3, 4, 5, or 6) of SEQ ID NO: 577, and ends at any one of amino acids 54-59 (e.g., amino acid residues 54, 55, 56, 57, 58, or 59) of SEQ ID NO: 577. In some embodiments, heteromultimers of the disclosure comprise at least one hemojuvelin polypeptide that is at least 70%, 75%, 80%, 85%, 90%, 91%, 92%, 93%, 94%, 95%, 96%, 97%, 98%, 99%, or 100% identical to a polypeptide that begins at any one of amino acids of 60-72 (e.g., amino acid residues 60, 61, 62, 63, 64, 65, 66, 67, 68, 69, 70, 71, or 72) of SEQ ID NO: 577, and ends at any one of amino acids 248-287 (e.g., amino acid residues 248, 249, 250, 251, 252, 253, 254, 255, 256, 257, 258, 259, 260, 261, 262, 263, 264, 265, 266, 267, 268, 269, 270, 271, 272, 273, 274, 275, 276, 277, 278, 279, 280, 281, 282, 283, 284, 285, 286, or 287) of SEQ ID NO: 577. In some embodiments, heteromultimers of the disclosure comprise of at least one hemojuvelin polypeptide that is at least 70%, 75%, 80%, 85%, 90%, 91%, 92%, 93%, 94%, 95%, 96%, 97%, 98%, 99%, or 100% identical to amino acids of 1-287 of SEQ ID NO: 577. In some embodiments, heteromultimers of the disclosure comprise of at least one hemojuvelin polypeptide that is at least 70%, 75%, 80%, 85%, 90%, 91%, 92%, 93%, 94%, 95%, 96%, 97%, 98%, 99%, or 100% identical to amino acids of 1-313 of SEQ ID NO: 577. In some embodiments, heteromultimers of the disclosure comprise of at least one hemojuvelin polypeptide that is at least 70%, 75%, 80%, 85%, 90%, 91%, 92%, 93%, 94%, 95%, 96%, 97%, 98%, 99%, or 100% identical to amino acids of 6-287 of SEQ ID NO: 577. In some embodiments, heteromultimers of the disclosure comprise of at least one hemojuvelin polypeptide that is at least 70%, 75%, 80%, 85%, 90%, 91%, 92%, 93%, 94%, 95%, 96%, 97%, 98%, 99%, or 100% identical to amino acids of 6-313 of SEQ ID NO: 577. In some embodiments, heteromultimers of the disclosure comprise of at least one hemojuvelin polypeptide that is at least 70%, 75%, 80%, 85%, 90%, 91%, 92%, 93%, 94%, 95%, 96%, 97%, 98%, 99%, or 100% identical to amino acids of 1-54 of SEQ ID NO: 577. In some embodiments, heteromultimers of the disclosure comprise of at least one hemojuvelin polypeptide that is at least 70%, 75%, 80%, 85%, 90%, 91%, 92%, 93%, 94%, 95%, 96%, 97%, 98%, 99%, or 100% identical to amino acids of 1-59 of SEQ ID NO: 577. In some embodiments, heteromultimers of the disclosure comprise of at least one hemojuvelin polypeptide that is at least 70%, 75%, 80%, 85%, 90%, 91%, 92%, 93%, 94%, 95%, 96%, 97%, 98%, 99%, or 100% identical to amino acids of 6-54 of SEQ ID NO: 577. In some embodiments, heteromultimers of the disclosure comprise of at least one hemojuvelin polypeptide that is at least 70%, 75%, 80%, 85%, 90%, 91%, 92%, 93%, 94%, 95%, 96%, 97%, 98%, 99%, or 100% identical to amino acids of 6-59 of SEQ ID NO: 577. In some embodiments, heteromultimers of the disclosure comprise of at least one hemojuvelin polypeptide that is at least 70%, 75%, 80%, 85%, 90%, 91%, 92%, 93%, 94%, 95%, 96%, 97%, 98%, 99%, or 100% identical to amino acids of 60-248 of SEQ ID NO: 577. In some embodiments, heteromultimers of the disclosure comprise of at least one hemojuvelin polypeptide that is at least 70%, 75%, 80%, 85%, 90%, 91%, 92%, 93%, 94%, 95%, 96%, 97%, 98%, 99%, or 100% identical to amino acids of 60-287 of SEQ ID NO: 577. In some embodiments, heteromultimers of the disclosure comprise of at least one hemojuvelin polypeptide that is at least 70%, 75%, 80%, 85%, 90%, 91%, 92%, 93%, 94%, 95%, 96%, 97%, 98%, 99%, or 100% identical to amino acids of 72-248 of SEQ ID NO: 577. In some embodiments, heteromultimers of the disclosure comprise of at least one hemojuvelin polypeptide that is at least 70%, 75%, 80%, 85%, 90%, 91%, 92%, 93%, 94%, 95%, 96%, 97%, 98%, 99%, or 100% identical to amino acids of 72-287 of SEQ ID NO: 577. In some embodiments, heteromultimers of the disclosure comprise at least one hemojuvelin protein, wherein the hemojuvelin protein is a dimer comprising a first polypeptide that is at least 70%, 75%, 80%, 85%, 90%, 91%, 92%, 93%, 94%, 95%, 96%, 97%, 98%, 99%, or 100% identical to a polypeptide that begins at any one of amino acids of 1-6 (e.g., amino acid residues 1, 2, 3, 4, 5, or 6) of SEQ ID NO: 577, and ends at any one of amino acids 54-59 (e.g., amino acid residues 54, 55, 56, 57, 58, or 59) of SEQ ID NO: 577, and second polypeptide that is at least 70%, 75%, 80%, 85%, 90%, 91%, 92%, 93%, 94%, 95%, 96%, 97%, 98%, 99%, or 100% identical to a polypeptide that begins at any one of amino acids of 60-72 (e.g., amino acid residues 60, 61, 62, 63, 64, 65, 66, 67, 68, 69, 70, 71, or 72) of SEQ ID NO: 577, and ends at any one of amino acids 248-287 (e.g., amino acid residues 248, 249, 250, 251, 252, 253, 254, 255, 256, 257, 258, 259, 260, 261, 262, 263, 264, 265, 266, 267, 268, 269, 270, 271, 272, 273, 274, 275, 276, 277, 278, 279, 280, 281, 282, 283, 284, 285, 286, or 287) of SEQ ID NO: 577. In some embodiments, heteromultimers of the disclosure comprise at least one single chain ligand trap that comprises a first hemojuvelin polypeptide domain that is at least 70%, 75%, 80%, 85%, 90%, 91%, 92%, 93%, 94%, 95%, 96%, 97%, 98%, 99%, or 100% identical to a polypeptide that begins at any one of amino acids of 1-6 (e.g., amino acid residues 1, 2, 3, 4, 5, or 6) of SEQ ID NO: 577, and ends at any one of amino acids 54-59 (e.g., amino acid residues 54, 55, 56, 57, 58, or 59) of SEQ ID NO: 577, and second hemojuvelin polypeptide domain that is at least 70%, 75%, 80%, 85%, 90%, 91%, 92%, 93%, 94%, 95%, 96%, 97%, 98%, 99%, or 100% identical to a polypeptide that begins at any one of amino acids of 60-72 (e.g., amino acid residues 60, 61, 62, 63, 64, 65, 66, 67, 68, 69, 70, 71, or 72) of SEQ ID NO: 577, and ends at any one of amino acids 248-287 (e.g., amino acid residues 248, 249, 250, 251, 252, 253, 254, 255, 256, 257, 258, 259, 260, 261, 262, 263, 264, 265, 266, 267, 268, 269, 270, 271, 272, 273, 274, 275, 276, 277, 278, 279, 280, 281, 282, 283, 284, 285, 286, or 287) of SEQ ID NO: 577. In some embodiments, heteromultimers of the disclosure comprise at least one hemojuvelin polypeptide that is at least 70%, 75%, 80%, 85%, 90%, 91%, 92%, 93%, 94%, 95%, 96%, 97%, 98%, 99%, or 100% identical to a polypeptide that begins at any one of amino acids of 1-4 (e.g., amino acid residues 1, 2, 3, or 4) of SEQ ID NO: 581, and ends at any one of amino acids 135-200 (e.g., amino acid residues 135, 135, 136, 137, 138, 139, 140, 141, 142, 143, 144, 145, 146, 147, 148, 149, 150, 151, 152, 153, 154, 155, 156, 157, 158, 159, 160, 161, 162, 163, 164, 165, 166, 167, 168, 169, 170, 171, 172, 173, 174, 175, 176, 177, 178, 179, 180, 181, 182, 183, 184, 185, 186, 187, 188, 189, 190, 191, 192, 193, 194, 195, 196, 197, 198, 199, 200) of SEQ ID NO: 581. In some embodiments, heteromultimers of the disclosure comprise of at least one hemojuvelin polypeptide that is at least 70%, 75%, 80%, 85%, 90%, 91%, 92%, 93%, 94%, 95%, 96%, 97%, 98%, 99%, or 100% identical to amino acids of 1-135 of SEQ ID NO: 581. In some embodiments, heteromultimers of the disclosure comprise of at least one hemojuvelin polypeptide that is at least 70%, 75%, 80%, 85%, 90%, 91%, 92%, 93%, 94%, 95%, 96%, 97%, 98%, 99%, or 100% identical to amino acids of 1-200 of SEQ ID NO: 581. In some embodiments, heteromultimers of the disclosure comprise of at least one hemojuvelin polypeptide that is at least 70%, 75%, 80%, 85%, 90%, 91%, 92%, 93%, 94%, 95%, 96%, 97%, 98%, 99%, or 100% identical to amino acids of 4-135 of SEQ ID NO: 581. In some embodiments, heteromultimers of the disclosure comprise of at least one hemojuvelin polypeptide that is at least 70%, 75%, 80%, 85%, 90%, 91%, 92%, 93%, 94%, 95%, 96%, 97%, 98%, 99%, or 100% identical to amino acids of 4-200 of SEQ ID NO: 581. In some embodiments, heteromultimers of the disclosure comprise of at least one hemojuvelin polypeptide that is at least 70%, 75%, 80%, 85%, 90%, 91%, 92%, 93%, 94%, 95%, 96%, 97%, 98%, 99%, or 100% identical to amino acids of 1-174 of SEQ ID NO: 581. In some embodiments, heteromultimers of the disclosure comprise of at least one hemojuvelin polypeptide that is at least 70%, 75%, 80%, 85%, 90%, 91%, 92%, 93%, 94%, 95%, 96%, 97%, 98%, 99%, or 100% identical to amino acids of 4-174 of SEQ ID NO: 581. In some embodiments, heteromultimers of the disclosure comprise at least one hemojuvelin polypeptide that is at least 70%, 75%, 80%, 85%, 90%, 91%, 92%, 93%, 94%, 95%, 96%, 97%, 98%, 99%, or 100% identical to a polypeptide that begins at any one of amino acids of 36-37 (e.g., amino acid residues 36 or 37) of SEQ ID NO: 573, and ends at any one of amino acids 424-426 (e.g., amino acid residues 424, 425, or 426) of SEQ ID NO: 573. In some embodiments, heteromultimers of the disclosure comprise of at least one hemojuvelin polypeptide that is at least 70%, 75%, 80%, 85%, 90%, 91%, 92%, 93%, 94%, 95%, 96%, 97%, 98%, 99%, or 100% identical to amino acids of 36-426 of SEQ ID NO: 573. In some embodiments, heteromultimers of the disclosure comprise of at least one hemojuvelin polypeptide that is at least 70%, 75%, 80%, 85%, 90%, 91%, 92%, 93%, 94%, 95%, 96%, 97%, 98%, 99%, or 100% identical to amino acids of 37-424 of SEQ ID NO: 573. In some embodiments, heteromultimers of the disclosure comprise of at least one hemojuvelin polypeptide that is at least 70%, 75%, 80%, 85%, 90%, 91%, 92%, 93%, 94%, 95%, 96%, 97%, 98%, 99%, or 100% identical to amino acids of 36-400 of SEQ ID NO: 573. In some embodiments, heteromultimers of the disclosure comprise at least one hemojuvelin polypeptide that is at least 70%, 75%, 80%, 85%, 90%, 91%, 92%, 93%, 94%, 95%, 96%, 97%, 98%, 99%, or 100% identical to a polypeptide that begins at any one of amino acids of 1-4 (e.g., amino acid residues 1, 2, 3, or 4) of SEQ ID NO: 582, and ends at any one of amino acids 135-174 (e.g., amino acid residues 135, 136, 137, 138, 139, 140, 141, 142, 143, 144, 145, 146, 147, 148, 149, 150, 151, 152, 153, 154, 155, 156, 157, 158, 159, 160, 161, 162, 163, 164, 165, 166, 167, 168, 169, 170, 171, 172, 173, or 174) of SEQ ID NO: 582. In some embodiments, heteromultimers of the disclosure comprise of at least one hemojuvelin polypeptide that is at least 70%, 75%, 80%, 85%, 90%, 91%, 92%, 93%, 94%, 95%, 96%, 97%, 98%, 99%, or 100% identical to amino acids of 1-174 of SEQ ID NO: 582. In some embodiments, heteromultimers of the disclosure comprise of at least one hemojuvelin polypeptide that is at least 70%, 75%, 80%, 85%, 90%, 91%, 92%, 93%, 94%, 95%, 96%, 97%, 98%, 99%, or 100% identical to amino acids of 4-135 of SEQ ID NO: 582. In some embodiments, heteromultimers of the disclosure comprise of at least one hemojuvelin polypeptide that is at least 70%, 75%, 80%, 85%, 90%, 91%, 92%, 93%, 94%, 95%, 96%, 97%, 98%, 99%, or 100% identical to amino acids of 1-174 of SEQ ID NO: 582. In some embodiments, heteromultimers of the disclosure comprise at least one hemojuvelin polypeptide that is at least 70%, 75%, 80%, 85%, 90%, 91%, 92%, 93%, 94%, 95%, 96%, 97%, 98%, 99%, or 100% identical to a polypeptide that begins at any one of amino acids of 1-6 (e.g., amino acid residues 1, 2, 3, 4, 5, or 6) of SEQ ID NO: 577, and ends at any one of amino acids 311-313 (e.g., amino acid residues 311, 312, or 313) of SEQ ID NO: 577. In some embodiments, heteromultimers of the disclosure comprise of at least one hemojuvelin polypeptide that is at least 70%, 75%, 80%, 85%, 90%, 91%, 92%, 93%, 94%, 95%, 96%, 97%, 98%, 99%, or 100% identical to amino acids of 1-313 of SEQ ID NO: 577. In some embodiments, heteromultimers of the disclosure comprise of at least one hemojuvelin polypeptide that is at least 70%, 75%, 80%, 85%, 90%, 91%, 92%, 93%, 94%, 95%, 96%, 97%, 98%, 99%, or 100% identical to amino acids of 6-311 of SEQ ID NO: 577. In some embodiments, heteromultimers of the disclosure comprise of at least one hemojuvelin polypeptide that is at least 70%, 75%, 80%, 85%, 90%, 91%, 92%, 93%, 94%, 95%, 96%, 97%, 98%, 99%, or 100% identical to amino acids of 1-127 of SEQ ID NO: 577.

[0582] The term “betaglycan polypeptide” includes polypeptides comprising any naturally occurring betaglycan protein (encoded by TGFBR3 or one of its nonhuman orthologs) as well as any variants thereof (including mutants, fragments, fusions, and peptidomimetic forms) that retain a useful activity.

[0583] The human betaglycan isoform A precursor protein sequence (NCBI Ref Seq NP_003234.2) is as follows:

```
(SEQ ID NO: 585)
    1 MTSHYVIAIF ALMSSCLATA GPEPGALCEL SPVSASHPVQ ALMESFTVLS GCASRGTTGL
  61 PQEVHVLNLR TAGQGPGQLQ REVTLHLNPI SSVHIHHKSV VFLLNSPHPL VWHLKTERLA
121 TGVSRLFLVS EGSVVQFSSA NFSLTAETEE RNFPHGNEHL LNWARKEYGA VTSFTELKIA
181 RNIYIKVGED QVFPPKCNIG KNFLSLNYLA EYLQPKAAEG CVMSSQPQNE EVHIIELITP
241 NSNPYSAFQV DITIDIRPSQ EDLEVVKNLI LILKCKKSVN WVIKSFDVKG SLKIIAPNSI

[chemical structure]

841 QSTPCSSSST A
```

[0584] The signal peptide is indicated by single underline, the extracellular domain is indicated in bold font, and the transmembrane domain is indicated by dotted underline. This isoform differs from betaglycan isoform B by insertion of a single alanine indicated above by double underline.

[0585] A processed betaglycan isoform A polypeptide sequence is as follows:

(SEQ ID NO: 586)
GPEPGALCELSPVSASHPVQALMESFTVLSGCASRGTTGLPQEVHVLNLR
TAGQGPGQLQREVTLHLNPISSVHIHHKSVVFLLNSPHPLVWHLKTERLA
TGVSRLFLVSEGSVVQFSSANFSLTAETEERNFPHGNEHLLNWARKEYGA
VTSFTELKIARNIYIKVGEDQVFPPKCNIGKNFLSLNYLAEYLQPKAAEG
CVMSSQPQNEEVHIIELITPNSNPYSAFQVDITIDIRPSQEDLEVVKNLI
LILKCKKSVNWVIKSFDVKGSLKIIAPNSIGFGKESERSMTMTKSIRDDI
PSTQGNLVKWALDNGYSPITSYTMAPVANRFHLRLENNAEEMGDEEVHTI
PPELRILLDPGALPALQNPPIRGGEGQNGGLPFPFPDISRRVWNEEGEDG
LPRPKDPVIPSIQLFPGLREPEEVQGSVDIALSVKCDNEKMIVAVEKDSF
QASGYSGMDVTLLDPTCKAKMNGTHFVLESPLNGCGTRPRWSALDGVVYY
NSIVIQVPALGDSSGWPDGYEDLESGDNGFPGDMDEGDASLFTRPEIVVF
NCSLQQVRNPSSFQEQPHGNITFNMELYNTDLFLVPSQGVFSVPENGHVY
VEVSVTKAEQELGFAIQTCFISPYSNPDRMSHYTIIENICPKDESVKFYS
PKRVHFPIPQADMDKKRFSFVFKPVFNTSLLFLQCELTLCTKMEKHPQKL
PKCVPPDEACTSLDASIIWAMMQNKKTFTKPLAVIHHEAESKEKGPSMKE
PNPISPPIFHGLDTLTV

[0586] A nucleic acid sequence encoding the unprocessed precursor protein of human betaglycan isoform A is shown below (SEQ ID NO: 587), corresponding to nucleotides 516-3068 of NCBI Reference Sequence NM_003243.4. The signal sequence is indicated by solid underline and the transmembrane region by dotted underline.

(SEQ ID NO: 587)
ATGACTTCCCATTATGTGATTGCCATCTTTGCCCTGATGAGCTCCTGTTTAGCCACTGCAGGTCCAGAGCCTGGT
GCACTGTGTGAACTGTCACCTGTCAGTGCCTCCCATCCTGTCCAGGCCTTGATGGAGAGCTTCACTGTTTTGTCA
GGCTGTGCCAGCAGAGGCACAACTGGGCTGCCACAGGAGGTGCATGTCCTGAATCTCCGCACTGCAGGCCAGGGG
CCTGGCCAGCTACAGAGAGAGGTCACACTTCACCTGAATCCCATCTCCTCAGTCCACATCCACCACAAGTCTGTT
GTGTTCCTGCTCAACTCCCCACACCCCCTGGTGTGGCATCTGAAGACAGAGAGACTTGCCACTGGGGTCTCCAGA
CTGTTTTTGGTGTCTGAGGGTTCTGTGGTCCAGTTTTCATCAGCAAACTTCTCCTTGACAGCAGAAACAGAAGAA
AGGAACTTCCCCCATGGAAATGAACATCTGTTAAATTGGGCCCGAAAAGAGTATGGAGCAGTTACTTCATTCACC
GAACTCAAGATAGCAAGAAACATTTATATTAAAGTGGGGGAAGATCAAGTGTTCCCTCCAAAGTGCAACATAGGG
AAGAATTTTCTCTCACTCAATTACCTTGCTGAGTACCTTCAACCCAAAGCAGCAGAAGGGTGTGTGATGTCCAGC
CAGCCCCAGAATGAGGAAGTACACATCATCGAGCTAATCACCCCCAACTCTAACCCCTACAGTGCTTTCCAGGTG
GATATAACAATTGATATAAGACCTTCTCAAGAGGATCTTGAAGTGGTCAAAAATCTCATCCTGATCTTGAAGTGC
AAAAAGTCTGTCAACTGGGTGATCAAATCTTTTGATGTTAAGGGAAGCCTGAAAATTATTGCTCCTAACAGTATT
GGCTTTGGAAAAGAGAGTGAAAGATCTATGACAATGACCAAATCAATAAGAGATGACATTCCTTCAACCCAAGGG
AATCTGGTGAAGTGGGCTTTGGACAATGGCTATAGTCCAATAACTTCATACACAATGGCTCCTGTGGCTAATAGA
TTTCATCTTCGGCTTGAAAATAATGCAGAGGAGATGGGAGATGAGGAAGTCCACACTATTCCTCCTGAGCTACGG
ATCCTGCTGGACCCTGGTGCCCTGCCTGCCCTGCAGAACCCGCCCATCCGGGGAGGGGAAGGCCAAAATGGAGGC
CTTCCGTTTCCTTTCCCAGATATTTCCAGGAGAGTCTGGAATGAAGAGGGAGAAGATGGGCTCCCTCGGCCAAAG
GACCCTGTCATTCCCAGCATACAACTGTTTCCTGGTCTCAGAGAGCCAGAAGAGGTGCAAGGGAGCGTGGATATT
GCCCTGTCTGTCAAATGTGACAATGAGAAGATGATCGTGGCTGTAGAAAAAGATTCTTTTCAGGCCAGTGGCTAC
TCGGGGATGGACGTCACCCTGTTGGATCCTACCTGCAAGGCCAAGATGAATGGCACACACTTTGTTTTGGAGTCT
CCTCTGAATGGCTGCGGTACTCGGCCCCGGTGGTCAGCCCTTGATGGTGTGGTCTACTATAACTCCATTGTGATA
CAGGTTCCAGCCCTTGGGGACAGTAGTGGTTGGCCAGATGGTTATGAAGATCTGGAGTCAGGTGATAATGGATTT
CCGGGAGATATGGATGAAGGAGATGCTTCCCTGTTCACCCGACCTGAAATCGTGGTGTTTAATTGCAGCCTTCAG
CAGGTGAGGAACCCCAGCAGCTTCCAGGAACAGCCCCACGGAAACATCACCTTCAACATGGAGCTATACAACACT
GACCTCTTTTTGGTGCCCTCCCAGGGCGTCTTCTCTGTGCCAGAGAATGGACACGTTTATGTTGAGGTATCTGTT
ACTAAGGCTGAACAAGAACTGGGATTTGCCATCCAAACGTGCTTTATCTCTCCATATTCGAACCCTGATAGGATG
TCTCATTACACCATTATTGAGAATATTTGTCCTAAAGATGAATCTGTGAAATTCTACAGTCCCAAGAGAGTGCAC
TTTCCTATCCCGCAAGCTGACATGGATAAGAAGCGATTCAGCTTTGTCTTCAAGCCTGTCTTCAACACCTCACTG
CTCTTTCTACAGTGTGAGCTGACGCTGTGTACGAAGATGGAGAAGCACCCCCAGAAGTTGCCTAAGTGTGTGCCT
CCTGACGAAGCCTGCACCTCGCTGGACGCCTCGATAATCTGGGCCATGATGCAGAATAAGAAGACGTTCACTAAG
CCCCTTGCTGTGATCCACCATGAAGCAGAATCTAAAGAAAAAGGTCCAAGCATGAAGGAACCAAATCCAATTTCT

[chemical structure]

[chemical structure]

CCAGCCTCGGAAAACAGCAGTGCTGCCCACAGCATCGGCAGCACGCAGAGCACGCCTTGCTCCAGCAGCAGCACG
GCC

[0587] A nucleic acid sequence encoding a processed extracellular domain of betaglycan isoform A is shown below (SEQ ID NO: 588):

(SEQ ID NO: 588)
GGTCCAGAGCCTGGTGCACTGTGTGAACTGTCACCTGTCAGTGCCTCCCA
TCCTGTCCAGGCCTTGATGGAGAGCTTCACTGTTTTGTCAGGCTGTGCCA
GCAGAGGCACAACTGGGCTGCCACAGGAGGTGCATGTCCTGAATCTCCGC
ACTGCAGGCCAGGGGCCTGGCCAGCTACAGAGAGAGGTCACACTTCACCT
GAATCCCATCTCCTCAGTCCACATCCACCACAAGTCTGTTGTGTTCCTGC
TCAACTCCCCACACCCCCTGGTGTGGCATCTGAAGACAGAGAGACTTGCC
ACTGGGGTCTCCAGACTGTTTTTGGTGTCTGAGGGTTCTGTGGTCCAGTT
TTCATCAGCAAACTTCTCCTTGACAGCAGAAACAGAAGAAAGGAACTTCC
CCCATGGAAATGAACATCTGTTAAATTGGGCCCGAAAAGAGTATGGAGCA
GTTACTTCATTCACCGAACTCAAGATAGCAAGAAACATTTATATTAAAGT
GGGGGAAGATCAAGTGTTCCCTCCAAAGTGCAACATAGGGAAGAATTTTC
TCTCACTCAATTACCTTGCTGAGTACCTTCAACCCAAAGCAGCAGAAGGG
TGTGTGATGTCCAGCCAGCCCCAGAATGAGGAAGTACACATCATCGAGCT
AATCACCCCCAACTCTAACCCCTACAGTGCTTTCCAGGTGGATATAACAA
TTGATATAAGACCTTCTCAAGAGGATCTTGAAGTGGTCAAAAATCTCATC
CTGATCTTGAAGTGCAAAAAGTCTGTCAACTGGGTGATCAAATCTTTTGA
TGTTAAGGGAAGCCTGAAAATTATTGCTCCTAACAGTATTGGCTTTGGAA
AAGAGAGTGAAAGATCTATGACAATGACCAAATCAATAAGAGATGACATT
CCTTCAACCCAAGGGAATCTGGTGAAGTGGGCTTTGGACAATGGCTATAG
TCCAATAACTTCATACACAATGGCTCCTGTGGCTAATAGATTTCATCTTC
GGCTTGAAAATAATGCAGAGGAGATGGGAGATGAGGAAGTCCACACTATT
CCTCCTGAGCTACGGATCCTGCTGGACCCTGGTGCCCTGCCTGCCCTGCA
GAACCCGCCCATCCGGGGAGGGGAAGGCCAAAATGGAGGCCTTCCGTTTC
CTTTCCCAGATATTTCCAGGAGAGTCTGGAATGAAGAGGGAGAAGATGGG
CTCCCTCGGCCAAAGGACCCTGTCATTCCCAGCATACAACTGTTTCCTGG
TCTCAGAGAGCCAGAAGAGGTGCAAGGGAGCGTGGATATTGCCCTGTCTG
TCAAATGTGACAATGAGAAGATGATCGTGGCTGTAGAAAAAGATTCTTTT
CAGGCCAGTGGCTACTCGGGGATGGACGTCACCCTGTTGGATCCTACCTG
CAAGGCCAAGATGAATGGCACACACTTTGTTTTGGAGTCTCCTCTGAATG
GCTGCGGTACTCGGCCCCGGTGGTCAGCCCTTGATGGTGTGGTCTACTAT
AACTCCATTGTGATACAGGTTCCAGCCCTTGGGGACAGTAGTGGTTGGCC
AGATGGTTATGAAGATCTGGAGTCAGGTGATAATGGATTTCCGGGAGATA
TGGATGAAGGAGATGCTTCCCTGTTCACCCGACCTGAAATCGTGGTGTTT
AATTGCAGCCTTCAGCAGGTGAGGAACCCCAGCAGCTTCCAGGAACAGCC
CCACGGAAACATCACCTTCAACATGGAGCTATACAACACTGACCTCTTTT
TGGTGCCCTCCCAGGGCGTCTTCTCTGTGCCAGAGAATGGACACGTTTAT
GTTGAGGTATCTGTTACTAAGGCTGAACAAGAACTGGGATTTGCCATCCA
AACGTGCTTTATCTCTCCATATTCGAACCCTGATAGGATGTCTCATTACA
CCATTATTGAGAATATTTGTCCTAAAGATGAATCTGTGAAATTCTACAGT
CCCAAGAGAGTGCACTTTCCTATCCCGCAAGCTGACATGGATAAGAAGCG
ATTCAGCTTTGTCTTCAAGCCTGTCTTCAACACCTCACTGCTCTTTCTAC
AGTGTGAGCTGACGCTGTGTACGAAGATGGAGAAGCACCCCCAGAAGTTG
CCTAAGTGTGTGCCTCCTGACGAAGCCTGCACCTCGCTGGACGCCTCGAT
AATCTGGGCCATGATGCAGAATAAGAAGACGTTCACTAAGCCCCTTGCTG
TGATCCACCATGAAGCAGAATCTAAAGAAAAAGGTCCAAGCATGAAGGAA
CCAAATCCAATTTCTCCACCAATTTTCCATGGTCTGGACACCCTAACCGT
G

[0588] A human betaglycan isoform B precursor protein sequence (NCBI Ref Seq NP_001182612.1) is as follows:

| (SEQ ID NO: 589) | |
|---|---|
| 1 | MTSHYVIAIF ALMSSCLATA GPEPGALCEL SPVSASHPVQ ALMESFTVLS GCASRGTTGL |
| 61 | PQEVHVLNLR TAGQGPGQLQ REVTLHLNPI SSVHIHHKSV VFLLNSPHPL VWHLKTERLA |
| 121 | TGVSRLFLVS EGSVVQFSSA NFSLTAETEE RNFPHGNEHL LNWARKEYGA VTSFTELKIA |
| 181 | RNIYIKVGED QVFPPKCNIG KNFLSLNYLA EYLQPKAAEG CVMSSQPQNE EVHIIELITP |
| 241 | NSNPYSAFQV DITIDIRPSQ EDLEVVKNLI LILKCKKSVN WVIKSFDVKG SLKIIAPNSI |
| 301 | GFGKESERSM TMTKSIRDDI PSTQGNLVKW ALDNGYSPIT SYTMAPVANR FHLRLENNEE |
| 361 | MGDEEVHTIP PELRILLDPG ALPALQNPPI RGGEGQNGGL PFPFPDISRR VWNEEGEDGL |
| 421 | PRPKDPVIPS IQLFPGLREP EEVQGSVDIA LSVKCDNEKM IVAVEKDSFQ ASGYSGMDVT |
| 481 | LLDPTCKAKM NGTHFVLESP LNGCGTRPRW SALDGVVYYN SIVIQVPALG DSSGWPDGYE |
| 541 | DLESGDNGFP GDMDEGDASL FTRPEIVVFN CSLQQVRNPS SFQEQPHGNI TFNMELYNTD |
| 601 | LFLVPSQGVF SVPENGHVYV EVSVTKAEQE LGFAIQTCFI SPYSNPDRMS HYTIIENICP |
| 661 | KDESVKFYSP KRVHFPIPQA DMDKKRFSFV FKPVFNTSLL FLQCELTLCT KMEKHPQKLP |
| 721 | KCVPPDEACT SLDASIIWAM MQNKKTFTKP LAVIHHEAES KEKGPSMKEP NPISPPIFHG |
| 781 | [chemical structure] |
| 841 | STPCSSSSTA |

[0589] The signal peptide is indicated by single underline, the extracellular domain is indicated in bold font, and the transmembrane domain is indicated by dotted underline.

[0590] A processed betaglycan isoform B polypeptide sequence is as follows:

(SEQ ID NO: 590)
GPEPGALCELSPVSASHPVQALMESFTVLSGCASRGTTGLPQEVHVLNLR
TAGQGPGQLQREVTLHLNPISSVHIHHKSVVFLLNSPHPLVWHLKTERLA
TGVSRLFLVSEGSVVQFSSANFSLTAETEERNFPHGNEHLLNWARKEYGA
VTSFTELKIARNIYIKVGEDQVFPPKCNIGKNFLSLNYLAEYLQPKAAEG
CVMSSQPQNEEVHIIELITPNSNPYSAFQVDITIDIRPSQEDLEVVKNLI
LILKCKKSVNWVIKSFDVKGSLKIIAPNSIGFGKESERSMTMTKSIRDDI
PSTQGNLVKWALDNGYSPITSYTMAPVANRFHLRLENNEEMGDEEVHTIP
PELRILLDPGALPALQNPPIRGGEGQNGGLPFPFPDISRRVWNEEGEDGL
PRPKDPVIPSIQLFPGLREPEEVQGSVDIALSVKCDNEKMIVAVEKDSFQ
ASGYSGMDVTLLDPTCKAKMNGTHFVLESPLNGCGTRPRWSALDGVVYYN
SIVIQVPALGDSSGWPDGYEDLESGDNGFPGDMDEGDASLFTRPEIVVFN
CSLQQVRNPSSFQEQPHGNITFNMELYNTDLFLVPSQGVFSVPENGHVYV
EVSVTKAEQELGFAIQTCFISPYSNPDRMSHYTIIENICPKDESVKFYSP
KRVHFPIPQADMDKKRFSFVFKPVFNTSLLFLQCELTLCTKMEKHPQKLP
KCVPPDEACTSLDASIIWAMMQNKKTFTKPLAVIHHEAESKEKGPSMKEP
NPISPPIFHGLDTLTV

[0591] A nucleic acid sequence encoding the unprocessed precursor protein of human betaglycan isoform B is shown below (SEQ ID NO: 591), corresponding to nucleotides 516-3065 of NCBI Reference Sequence NM_001195683.1. The signal sequence is indicated by solid underline and the transmembrane region by dotted underline.

(SEQ ID NO: 591)
ATGACTTCCCATTATGTGATTGCCATCTTTGCCCTGATGAGCTCCTGTTTAGCCACTGCAGGTCCAGAGCCTGGT
GCACTGTGTGAACTGTCACCTGTCAGTGCCTCCCATCCTGTCCAGGCCTTGATGGAGAGCTTCACTGTTTTGTCA
GGCTGTGCCAGCAGAGGCACAACTGGGCTGCCACAGGAGGTGCATGTCCTGAATCTCCGCACTGCAGGCCAGGGG
CCTGGCCAGCTACAGAGAGAGGTCACACTTCACCTGAATCCCATCTCCTCAGTCCACATCCACCACAAGTCTGTT
GTGTTCCTGCTCAACTCCCCACACCCCCTGGTGTGGCATCTGAAGACAGAGAGACTTGCCACTGGGGTCTCCAGA
CTGTTTTTGGTGTCTGAGGGTTCTGTGGTCCAGTTTTCATCAGCAAACTTCTCCTTGACAGCAGAAACAGAAGAA
AGGAACTTCCCCCATGGAAATGAACATCTGTTAAATTGGGCCCGAAAAGAGTATGGAGCAGTTACTTCATTCACC
GAACTCAAGATAGCAAGAAACATTTATATTAAAGTGGGGGAAGATCAAGTGTTCCCTCCAAAGTGCAACATAGGG
AAGAATTTTCTCTCACTCAATTACCTTGCTGAGTACCTTCAACCCAAAGCAGCAGAAGGGTGTGTGATGTCCAGC
CAGCCCCAGAATGAGGAAGTACACATCATCGAGCTAATCACCCCCAACTCTAACCCCTACAGTGCTTTCCAGGTG
GATATAACAATTGATATAAGACCTTCTCAAGAGGATCTTGAAGTGGTCAAAAATCTCATCCTGATCTTGAAGTGC
AAAAAGTCTGTCAACTGGGTGATCAAATCTTTTGATGTTAAGGGAAGCCTGAAAATTATTGCTCCTAACAGTATT
GGCTTTGGAAAAGAGAGTGAAAGATCTATGACAATGACCAAATCAATAAGAGATGACATTCCTTCAACCCAAGGG
AATCTGGTGAAGTGGGCTTTGGACAATGGCTATAGTCCAATAACTTCATACACAATGGCTCCTGTGGCTAATAGA
TTTCATCTTCGGCTTGAAAATAATGAGGAGATGGGAGATGAGGAAGTCCACACTATTCCTCCTGAGCTACGGATC
CTGCTGGACCCTGGTGCCCTGCCTGCCCTGCAGAACCCGCCCATCCGGGGAGGGGAAGGCCAAAATGGAGGCCTT
CCGTTTCCTTTCCCAGATATTTCCAGGAGAGTCTGGAATGAAGAGGGAGAAGATGGGCTCCCTCGGCCAAAGGAC
CCTGTCATTCCCAGCATACAACTGTTTCCTGGTCTCAGAGAGCCAGAAGAGGTGCAAGGGAGCGTGGATATTGCC
CTGTCTGTCAAATGTGACAATGAGAAGATGATCGTGGCTGTAGAAAAAGATTCTTTTCAGGCCAGTGGCTACTCG
GGGATGGACGTCACCCTGTTGGATCCTACCTGCAAGGCCAAGATGAATGGCACACACTTTGTTTTGGAGTCTCCT
CTGAATGGCTGCGGTACTCGGCCCCGGTGGTCAGCCCTTGATGGTGTGGTCTACTATAACTCCATTGTGATACAG
GTTCCAGCCCTTGGGGACAGTAGTGGTTGGCCAGATGGTTATGAAGATCTGGAGTCAGGTGATAATGGATTTCCG
GGAGATATGGATGAAGGAGATGCTTCCCTGTTCACCCGACCTGAAATCGTGGTGTTTAATTGCAGCCTTCAGCAG
GTGAGGAACCCCAGCAGCTTCCAGGAACAGCCCCACGGAAACATCACCTTCAACATGGAGCTATACAACACTGAC
CTCTTTTTGGTGCCCTCCCAGGGCGTCTTCTCTGTGCCAGAGAATGGACACGTTTATGTTGAGGTATCTGTTACT
AAGGCTGAACAAGAACTGGGATTTGCCATCCAAACGTGCTTTATCTCTCCATATTCGAACCCTGATAGGATGTCT
CATTACACCATTATTGAGAATATTTGTCCTAAAGATGAATCTGTGAAATTCTACAGTCCCAAGAGAGTGCACTTT
CCTATCCCGCAAGCTGACATGGATAAGAAGCGATTCAGCTTTGTCTTCAAGCCTGTCTTCAACACCTCACTGCTC
TTTCTACAGTGTGAGCTGACGCTGTGTACGAAGATGGAGAAGCACCCCCAGAAGTTGCCTAAGTGTGTGCCTCCT
GACGAAGCCTGCACCTCGCTGGACGCCTCGATAATCTGGGCCATGATGCAGAATAAGAAGACGTTCACTAAGCCC
CTTGCTGTGATCCACCATGAAGCAGAATCTAAAGAAAAAGGTCCAAGCATGAAGGAACCAAATCCAATTTCTCCA

[chemical structure]

[chemical structure]

GCCTCGGAAAACAGCAGTGCTGCCCACAGCATCGGCAGCACGCAGAGCACGCCTTGCTCCAGCAGCAGCACGGCC

[0592] A nucleic acid sequence encoding a processed extracellular domain of betaglycan isoform B is shown below (SEQ ID NO: 592):

(SEQ ID NO: 592)
GGTCCAGAGCCTGGTGCACTGTGTGAACTGTCACCTGTCAGTGCCTCCCA
TCCTGTCCAGGCCTTGATGGAGAGCTTCACTGTTTTGTCAGGCTGTGCCA
GCAGAGGCACAACTGGGCTGCCACAGGAGGTGCATGTCCTGAATCTCCGC
ACTGCAGGCCAGGGGCCTGGCCAGCTACAGAGAGAGGTCACACTTCACCT
GAATCCCATCTCCTCAGTCCACATCCACCACAAGTCTGTTGTGTTCCTGC
TCAACTCCCCACACCCCCTGGTGTGGCATCTGAAGACAGAGAGACTTGCC
ACTGGGGTCTCCAGACTGTTTTTGGTGTCTGAGGGTTCTGTGGTCCAGTT
TTCATCAGCAAACTTCTCCTTGACAGCAGAAACAGAAGAAAGGAACTTCC
CCCATGGAAATGAACATCTGTTAAATTGGGCCCGAAAAGAGTATGGAGCA
GTTACTTCATTCACCGAACTCAAGATAGCAAGAAACATTTATATTAAAGT
GGGGGAAGATCAAGTGTTCCCTCCAAAGTGCAACATAGGGAAGAATTTTC
TCTCACTCAATTACCTTGCTGAGTACCTTCAACCCAAAGCAGCAGAAGGG
TGTGTGATGTCCAGCCAGCCCCAGAATGAGGAAGTACACATCATCGAGCT
AATCACCCCCAACTCTAACCCCTACAGTGCTTTCCAGGTGGATATAACAA
TTGATATAAGACCTTCTCAAGAGGATCTTGAAGTGGTCAAAAATCTCATC
CTGATCTTGAAGTGCAAAAAGTCTGTCAACTGGGTGATCAAATCTTTTGA
TGTTAAGGGAAGCCTGAAAATTATTGCTCCTAACAGTATTGGCTTTGGAA
AAGAGAGTGAAAGATCTATGACAATGACCAAATCAATAAGAGATGACATT
CCTTCAACCCAAGGGAATCTGGTGAAGTGGGCTTTGGACAATGGCTATAG
TCCAATAACTTCATACACAATGGCTCCTGTGGCTAATAGATTTCATCTTC
GGCTTGAAAATAATGAGGAGATGGGAGATGAGGAAGTCCACACTATTCCT
CCTGAGCTACGGATCCTGCTGGACCCTGGTGCCCTGCCTGCCCTGCAGAA
CCCGCCCATCCGGGGAGGGGAAGGCCAAAATGGAGGCCTTCCGTTTCCTT
TCCCAGATATTTCCAGGAGAGTCTGGAATGAAGAGGGAGAAGATGGGCTC
CCTCGGCCAAAGGACCCTGTCATTCCCAGCATACAACTGTTTCCTGGTCT
CAGAGAGCCAGAAGAGGTGCAAGGGAGCGTGGATATTGCCCTGTCTGTCA
AATGTGACAATGAGAAGATGATCGTGGCTGTAGAAAAAGATTCTTTTCAG
GCCAGTGGCTACTCGGGGATGGACGTCACCCTGTTGGATCCTACCTGCAA
GGCCAAGATGAATGGCACACACTTTGTTTTGGAGTCTCCTCTGAATGGCT
GCGGTACTCGGCCCCGGTGGTCAGCCCTTGATGGTGTGGTCTACTATAAC
TCCATTGTGATACAGGTTCCAGCCCTTGGGGACAGTAGTGGTTGGCCAGA
TGGTTATGAAGATCTGGAGTCAGGTGATAATGGATTTCCGGGAGATATGG
ATGAAGGAGATGCTTCCCTGTTCACCCGACCTGAAATCGTGGTGTTTAAT
TGCAGCCTTCAGCAGGTGAGGAACCCCAGCAGCTTCCAGGAACAGCCCCA
CGGAAACATCACCTTCAACATGGAGCTATACAACACTGACCTCTTTTTGG
TGCCCTCCCAGGGCGTCTTCTCTGTGCCAGAGAATGGACACGTTTATGTT
GAGGTATCTGTTACTAAGGCTGAACAAGAACTGGGATTTGCCATCCAAAC
GTGCTTTATCTCTCCATATTCGAACCCTGATAGGATGTCTCATTACACCA
TTATTGAGAATATTTGTCCTAAAGATGAATCTGTGAAATTCTACAGTCCC
AAGAGAGTGCACTTTCCTATCCCGCAAGCTGACATGGATAAGAAGCGATT
CAGCTTTGTCTTCAAGCCTGTCTTCAACACCTCACTGCTCTTTCTACAGT
GTGAGCTGACGCTGTGTACGAAGATGGAGAAGCACCCCCAGAAGTTGCCT
AAGTGTGTGCCTCCTGACGAAGCCTGCACCTCGCTGGACGCCTCGATAAT
CTGGGCCATGATGCAGAATAAGAAGACGTTCACTAAGCCCCTTGCTGTGA
TCCACCATGAAGCAGAATCTAAAGAAAAAGGTCCAAGCATGAAGGAACCA
AATCCAATTTCTCCACCAATTTTCCATGGTCTGGACACCCTAACCGTG

[0593] In certain embodiments, the disclosure relates to heteromultimers that comprise at least one betaglycan polypeptide, which includes fragments, functional variants, and modified forms thereof. Preferably, betaglycan polypeptides for use in accordance with inventions of the disclosure (e.g., heteromultimers comprising a betaglycan polypeptide and uses thereof) are soluble (e.g., an extracellular domain of betaglycan). In other preferred embodiments, betaglycan polypeptides for use in accordance with the inventions of the disclosure bind to and/or inhibit (antagonize) activity (e.g., Smad signaling) of one or more TGF-beta superfamily ligands. In some embodiments, heteromultimers of the disclosure comprise of at least one betaglycan polypeptide that is at least 70%, 75%, 80%, 85%, 90%, 91%, 92%, 93%, 94%, 95%, 96%, 97%, 98%, 99%, or 100% identical to the amino acid sequence of SEQ ID NOs: 585, 586, 589, or 590. In some embodiments, heteromultimers of the disclosure comprise at least one betaglycan polypeptide that is at least 70%, 75%, 80%, 85%, 90%, 91%, 92%, 93%, 94%, 95%, 96%, 97%, 98%, 99%, or 100% identical to a polypeptide that begins at any one of amino acids of 21-28 (e.g., amino acid residues 21, 22, 23, 24, 25, 26, 27, or 28) of SEQ ID NO: 585, and ends at any one of amino acids 381-787 (e.g., amino acid residues 381, 382, 383, 384, 385, 386, 387, 388, 389, 390, 391, 392, 393, 394, 395, 396, 397, 398, 399, 400, 401, 402, 403, 404, 405, 406, 407, 408, 409, 410, 411, 412, 413, 414, 415, 416, 417, 418, 419, 420, 421, 422, 423, 424, 425, 426, 427, 428, 429, 430, 431, 432, 433, 434, 435, 436, 437, 438, 439, 440, 441, 442, 443, 444, 445, 446, 447, 448, 449, 450, 451, 452, 453, 454, 455, 456, 457, 458, 459, 460, 461, 462, 463, 464, 465, 466, 467, 468, 469, 470, 471, 472, 473, 474, 475, 476, 477, 478, 479, 480, 481, 482, 483, 484, 485, 486, 487, 488, 489, 490, 491, 492, 493, 494, 495, 496, 497, 498, 499, 500, 501, 502, 503, 504, 505, 506, 507, 508, 509, 510, 511, 512, 513, 514, 515, 516, 517, 518, 519, 520, 521, 522, 523, 524, 525, 526, 527, 528, 529, 530, 531, 532, 533, 534, 535, 536, 537, 538, 539, 540, 541, 542, 543, 544, 545, 546, 547, 548, 549, 550, 551, 552, 553, 554, 555, 556, 557, 558, 559, 560, 561, 562, 563, 564, 565, 566, 567, 568, 569, 570, 571, 572, 573, 574, 575, 576, 577, 578, 579, 580, 581, 582, 583, 584, 585, 586, 587, 588, 589, 590, 591, 592, 593, 594, 595, 596, 597, 598, 599, 600, 601, 602, 603, 604, 605, 606, 607, 608, 609, 610, 611, 612, 613, 614, 615, 616, 617, 618, 619, 620, 621, 622, 623, 624, 625, 626, 627, 628, 629, 630, 631, 632, 633, 634, 635, 635, 636, 637, 638, 639, 640, 641, 642, 643, 644, 645, 646, 647, 648, 649, 650, 651, 652, 653, 654, 655, 656, 657, 658, 659, 660, 661, 662, 663, 664, 665, 666, 667, 668, 669, 670, 671, 672, 673, 674, 675, 676, 677, 678, 679, 680, 681, 682, 683, 684, 685, 686, 687, 688, 689, 690, 691, 692, 693, 694, 695, 696, 697, 698, 699, 700, 701, 702, 703, 704, 705, 706, 707, 708, 709, 710, 711, 712, 713, 714, 715, 716, 717, 718, 719, 720, 721, 722, 723, 724, 725, 726, 727, 728, 729, 730, 731, 732, 733, 734, 735, 736, 737, 738, 739, 740, 741, 742, 743, 744, 745, 746, 747, 748, 749, 750, 751, 752, 753, 754, 755, 756, 757, 758, 759, 760, 761, 762, 763, 764, 765, 766, 767, 768, 769, 770, 771, 772, 773, 774, 775, 776, 777, 778, 779, 780, 781, 782, 783, 784, 785, 786, or 787) of SEQ ID NO: 585. In some embodiments, heteromultimers of the disclosure comprise at least one betaglycan polypeptide that is at least 70%, 75%, 80%, 85%, 90%, 91%, 92%, 93%, 94%, 95%, 96%, 97%, 98%, 99%, or 100% identical to amino acids of 21-381 of SEQ ID NO: 585. In some embodiments, heteromultimers of the disclosure comprise at least one betaglycan polypeptide that is at least 70%, 75%, 80%, 85%, 90%, 91%, 92%, 93%, 94%, 95%, 96%, 97%, 98%, 99%, or 100% identical to amino acids of 21-787 of SEQ ID NO: 585. In some embodiments, heteromultimers of the disclosure comprise at least one betaglycan polypeptide that is at least 70%, 75%, 80%, 85%, 90%, 91%, 92%, 93%, 94%, 95%, 96%, 97%, 98%, 99%, or 100% identical to amino acids of 28-381 of SEQ ID NO: 585. In some embodiments, heteromultimers of the disclosure comprise at least one betaglycan polypeptide that is at least 70%, 75%, 80%, 85%, 90%, 91%, 92%, 93%, 94%, 95%, 96%, 97%, 98%, 99%, or 100% identical to amino acids of 28-787 of SEQ ID NO: 585. In some embodiments, heteromultimers of the disclosure comprise of at least one betaglycan polypeptide that is at least 70%, 75%, 80%, 85%, 90%, 91%, 92%, 93%, 94%, 95%, 96%, 97%, 98%, 99%, or 100% identical to amino acids of 21-781 of SEQ ID NO: 585. In some embodiments, heteromultimers of the disclosure comprise at least one betaglycan polypeptide that is at least 70%, 75%, 80%, 85%, 90%, 91%, 92%, 93%, 94%, 95%, 96%, 97%, 98%, 99%, or 100% identical to amino acids of 28-781 of SEQ ID NO: 585. In some embodiments, heteromultimers of the disclosure comprise at least one betaglycan polypeptide that is at least 70%, 75%, 80%, 85%, 90%, 91%, 92%, 93%, 94%, 95%, 96%, 97%, 98%, 99%, or 100% identical to a polypeptide that begins at any one of amino acids of 21-28 (e.g., amino acid residues 21, 22, 23, 24, 25, 26, or 27) of SEQ ID NO: 589, and ends at any one of amino acids 380-786 (e.g., amino acid residues 380, 381, 382, 383, 384, 385, 386, 387, 388, 389, 390, 391, 392, 393, 394, 395, 396, 397, 398, 399, 400, 401, 402, 403, 404, 405, 406, 407, 408, 409, 410, 411, 412, 413, 414, 415, 416, 417, 418, 419, 420, 421, 422, 423, 424, 425, 426, 427, 428, 429, 430, 431, 432, 433, 434, 435, 436, 437, 438, 439, 440, 441, 442, 443, 444, 445, 446, 447, 448, 449, 450, 451, 452, 453, 454, 455, 456, 457, 458, 459, 460, 461, 462, 463, 464, 465, 466, 467, 468, 469, 470, 471, 472, 473, 474, 475, 476, 477, 478, 479, 480, 481, 482, 483, 484, 485, 486, 487, 488, 489, 490, 491, 492, 493, 494, 495, 496, 497, 498, 499, 500, 501, 502, 503, 504, 505, 506, 507, 508, 509, 510, 511, 512, 513, 514, 515, 516, 517, 518, 519, 520, 521, 522, 523, 524, 525, 526, 527, 528, 529, 530, 531, 532, 533, 534, 535, 536, 537, 538, 539, 540, 541, 542, 543, 544, 545, 546, 547, 548, 549, 550, 551, 552, 553, 554, 555, 556, 557, 558, 559, 560, 561, 562, 563, 564, 565, 566, 567, 568, 569, 570, 571, 572, 573, 574, 575, 576, 577, 578, 579, 580, 581, 582, 583, 584, 585, 586, 587, 588, 589, 590, 591, 592, 593, 594, 595, 596, 597, 598, 599, 600, 601, 602, 603, 604, 605, 606, 607, 608, 609, 610, 611, 612, 613, 614, 615, 616, 617, 618, 619, 620, 621, 622, 623, 624, 625, 626, 627, 628, 629, 630, 631, 632, 633, 634, 635, 635, 636, 637, 638, 639, 640, 641, 642, 643, 644, 645, 646, 647, 648, 649, 650, 651, 652, 653, 654, 655, 656, 657, 658, 659, 660, 661, 662, 663, 664, 665, 666, 667, 668, 669, 670, 671, 672, 673, 674, 675, 676, 677, 678, 679, 680, 681, 682, 683, 684, 685, 686, 687, 688, 689, 690, 691, 692, 693, 694, 695, 696, 697, 698, 699, 700, 701, 702, 703, 704, 705, 706, 707, 708, 709, 710, 711, 712, 713, 714, 715, 716, 717, 718, 719, 720, 721, 722, 723, 724, 725, 726, 727, 728, 729, 730, 731, 732, 733, 734, 735, 736, 737, 738, 739, 740, 741, 742, 743, 744, 745, 746, 747, 748, 749, 750, 751, 752, 753, 754, 755, 756, 757, 758, 759, 760, 761, 762, 763, 764, 765, 766, 767, 768, 769, 770, 771, 772, 773, 774, 775, 776, 777, 778, 779, 780, 781, 782, 783, 784, 785, or 786) of SEQ ID NO: 589. In some embodiments, heteromultimers of the disclosure comprise at least one betaglycan polypeptide that is at least 70%, 75%, 80%, 85%, 90%, 91%, 92%, 93%, 94%, 95%, 96%, 97%, 98%, 99%, or 100% identical to amino acids of 21-380 of SEQ ID NO: 589. In some embodiments, heteromultimers of the disclosure comprise at least one betaglycan polypeptide that is at least 70%, 75%, 80%, 85%, 90%, 91%, 92%, 93%, 94%, 95%, 96%, 97%, 98%, 99%, or 100% identical to amino acids of 21-786 of SEQ ID NO: 589. In some embodiments, heteromultimers of the disclosure comprise at least one betaglycan polypeptide that is at least 70%, 75%, 80%, 85%, 90%, 91%, 92%, 93%, 94%, 95%, 96%, 97%, 98%, 99%, or 100% identical to amino acids of 28-380 of SEQ ID NO: 589. In some embodiments, heteromultimers of the disclosure comprise at least one betaglycan polypeptide that is at least 70%, 75%, 80%, 85%, 90%, 91%, 92%, 93%, 94%, 95%, 96%, 97%, 98%, 99%, or 100% identical to amino acids of 28-786 of SEQ ID NO: 589. In some embodiments, heteromultimers of the disclosure comprise at least one betaglycan polypeptide that is at least 70%, 75%, 80%, 85%, 90%, 91%, 92%, 93%, 94%, 95%, 96%, 97%, 98%, 99%, or 100% identical to amino acids of 21-780 of SEQ ID NO: 589. In some embodiments, heteromultimers of the disclosure comprise at least one betaglycan polypeptide that is at least 70%, 75%, 80%, 85%, 90%, 91%, 92%, 93%, 94%, 95%, 96%, 97%, 98%, 99%, or 100% identical to amino acids of 28-780 of SEQ ID NO: 589.

[0594] In some embodiments, heteromultimers of the disclosure comprise at least one betaglycan polypeptide that is at least 70%, 75%, 80%, 85%, 90%, 91%, 92%, 93%, 94%, 95%, 96%, 97%, 98%, 99%, or 100% identical to a polypeptide that begins at any one of amino acids of 21-28 (e.g., amino acid residues 21, 22, 23, 24, 25, 26, 27, or 28) of SEQ ID NO: 585, and ends at any one of amino acids 730-787 (e.g., amino acid residues 730, 731, 732, 733, 734, 735, 736, 737, 738, 739, 740, 741, 742, 743, 744, 745, 746, 747, 748, 749, 750, 751, 752, 753, 754, 755, 756, 757, 758, 759, 760, 761, 762, 763, 764, 765, 766, 767, 768, 769, 770, 771, 772, 773, 774, 775, 776, 777, 778, 779, 780, 781, 782, 783, 784, 785, 786, or 787) of SEQ ID NO: 585. In some embodiments, heteromultimers of the disclosure comprise at least one betaglycan polypeptide that is at least 70%, 75%, 80%, 85%, 90%, 91%, 92%, 93%, 94%, 95%, 96%, 97%, 98%, 99%, or 100% identical to amino acids of 21-787 of SEQ ID NO: 585. In some embodiments, heteromultimers of the disclosure comprise at least one betaglycan polypeptide that is at least 70%, 75%, 80%, 85%, 90%, 91%, 92%, 93%, 94%, 95%, 96%, 97%, 98%, 99%, or 100% identical to amino acids of 28-730 of SEQ ID NO: 585. In some embodiments, heteromultimers of the disclosure comprise at least one betaglycan polypeptide that is at least 70%, 75%, 80%, 85%, 90%, 91%, 92%, 93%, 94%, 95%, 96%, 97%, 98%, 99%, or 100% identical to a polypeptide that begins at any one of amino acids of 21-28 (e.g., amino acid residues 21, 22, 23, 24, 25, 26, 27, or 28) of SEQ ID NO: 585, and ends at any one of amino acids 730-787 (e.g., amino acid residues 730, 731, 732, 733, 734, 735, 736, 737, 738, 739, 740, 741, 742, 743, 744, 745, 746, 747, 748, 749, 750, 751, 752, 753, 754, 755, 756, 757, 758, 759, 760, 761, 762, 763, 764, 765, 766, 767, 768, 769, 770, 771, 772, 773, 774, 775, 776, 777, 778, 779, 780, 781, 782, 783, 784, 785, 786, or 787) of SEQ ID NO: 585. In some embodiments, heteromultimers of the disclosure comprise at least one betaglycan polypeptide that is at least 70%, 75%, 80%, 85%, 90%, 91%, 92%, 93%, 94%, 95%, 96%, 97%, 98%, 99%, or 100% identical to amino acids of 21-787 of SEQ ID NO: 585. In some embodiments, heteromultimers of the disclosure comprise at least one betaglycan polypeptide that is at least 70%, 75%, 80%, 85%, 90%, 91%, 92%, 93%, 94%, 95%, 96%, 97%, 98%, 99%, or 100% identical to amino acids of 28-730 of SEQ ID NO: 585. In some embodiments, heteromultimers of the disclosure comprise at least one betaglycan polypeptide that is at least 70%, 75%, 80%, 85%, 90%, 91%, 92%, 93%, 94%, 95%, 96%, 97%, 98%, 99%, or 100% identical to a polypeptide that begins at any one of amino acids of 21-28 (e.g., amino acid residues 21, 22, 23, 24, 25, 26, 27, or 28) of SEQ ID NO: 587, and ends at any one of amino acids 730-787 (e.g., amino acid residues 729, 730, 731, 732, 733, 734, 735, 736, 737, 738, 739, 740, 741, 742, 743, 744, 745, 746, 747, 748, 749, 750, 751, 752, 753, 754, 755, 756, 757, 758, 759, 760, 761, 762, 763, 764, 765, 766, 767, 768, 769, 770, 771, 772, 773, 774, 775, 776, 777, 778, 779, 780, 781, 782, 783, 784, 785, or 786) of SEQ ID NO: 587. In some embodiments, heteromultimers of the disclosure comprise at least one betaglycan polypeptide that is at least 70%, 75%, 80%, 85%, 90%, 91%, 92%, 93%, 94%, 95%, 96%, 97%, 98%, 99%, or 100% identical to amino acids of 21-786 of SEQ ID NO: 587. In some embodiments, heteromultimers of the disclosure comprise at least one betaglycan polypeptide that is at least 70%, 75%, 80%, 85%, 90%, 91%, 92%, 93%, 94%, 95%, 96%, 97%, 98%, 99%, or 100% identical to amino acids of 28-729 of SEQ ID NO: 587.

[0595] The term “MuSK polypeptide” includes polypeptides comprising any naturally occurring MuSK protein (encoded by MUSK or one of its nonhuman orthologs) as well as any variants thereof (including mutants, fragments, fusions, and peptidomimetic forms) that retain a useful activity.

[0596] A human MuSK isoform 1 precursor protein sequence (NCBI Reference Sequence NP_005583.1) is as follows:

| (SEQ ID NO: 595) | |
|---|---|
| 1 | MRELVNIPLV HILTLVAFSG TEKLPKAPVI TTPLETVDAL VEEVATFMCA |
| 51 | VESYPQPEIS WTRNKILIKL FDTRYSIREN GQLLTILSVE DSDDGIYCCT |
| 101 | ANNGVGGAVE SCGALQVKMK PKITRPPINV KIIEGLKAVL PCTTMGNPKP |
| 151 | SVSWIKGDSP LRENSRIAVL ESGSLRIHNV QKEDAGQYRC VAKNSLGTAY |
| 201 | SKVVKLEVEV FARILRAPES HNVTFGSFVT LHCTATGIPV PTITWIENGN |
| 251 | AVSSGSIQES VKDRVIDSRL QLFITKPGLY TCIATNKHGE KFSTAKAAAT |
| 301 | ISIAEWSKPQ KDNKGYCAQY RGEVCNAVLA KDALVFLNTS YADPEEAQEL |
| 351 | LVHTAWNELK VVSPVCRPAA EALLCNHIFQ ECSPGVVPTP IPICREYCLA |
| 401 | VKELFCAKEW LVMEEKTHRG LYRSEMHLLS VPECSKLPSM HWDPTACARL |
| 451 | [chemical structure] |
| 501 | [chemical structure] |
| 551 | NPMYQRMPLL LNPKLLSLEY PRNNIEYVRD IGEGAFGRVF QARAPGLLPY |
| 601 | EPFTMVAVKM LKEEASADMQ ADFQREAALM AEFDNPNIVK LLGVCAVGKP |
| 651 | MCLLFEYMAY GDLNEFLRSM SPHTVCSLSH SDLSMRAQVS SPGPPPLSCA |
| 701 | EQLCIARQVA AGMAYLSERK FVHRDLATRN CLVGENMVVK IADFGLSRNI |
| 751 | YSADYYKANE NDAIPIRWMP PESIFYNRYT TESDVWAYGV VLWEIFSYGL |
| 801 | QPYYGMAHEE VIYYVRDGNI LSCPENCPVE LYNLMRLCWS KLPADRPSFT |
| 851 | SIHRILERMC ERAEGTVSV |

[0597] The signal peptide is indicated by single underline, the extracellular domain is indicated in bold font, and the transmembrane domain is indicated by dotted underline. This isoform is the longest of human MuSK isoforms 1, 2, and 3.

[0598] A processed MuSK isoform 1 polypeptide sequence (SEQ ID NO: 596) is as follows:

| (SEQ ID NO: 596) | |
|---|---|
| 1 | GTEKLPKAPV ITTPLETVDA LVEEVATFMC AVESYPQPEI SWTRNKILIK |
| 51 | LFDTRYSIRE NGQLLTILSV EDSDDGIYCC TANNGVGGAV ESCGALQVKM |
| 101 | KPKITRPPIN VKIIEGLKAV LPCTTMGNPK PSVSWIKGDS PLRENSRIAV |
| 151 | LESGSLRIHN VQKEDAGQYR CVAKNSLGTA YSKVVKLEVE VFARILRAPE |
| 201 | SHNVTFGSFV TLHCTATGIP VPTITWIENG NAVSSGSIQE SVKDRVIDSR |
| 251 | LQLFITKPGL YTCIATNKHG EKFSTAKAAA TISIAEWSKP QKDNKGYCAQ |
| 301 | YRGEVCNAVL AKDALVFLNT SYADPEEAQE LLVHTAWNEL KVVSPVCRPA |
| 351 | AEALLCNHIF QECSPGVVPT PIPICREYCL AVKELFCAKE WLVMEEKTHR |
| 401 | GLYRSEMHLL SVPECSKLPS MHWDPTACAR LPHLDYNKEN LKTFPPMTSS |
| 451 | KPSVDIPNLP SSSSSSFSVS PTYSMT |

[0599] A nucleic acid sequence encoding the unprocessed precursor protein of human MuSK isoform 1 is shown below (SEQ ID NO: 597), corresponding to nucleotides 135-2744 of NCBI Reference Sequence NM_005592.3. The signal sequence is indicated by solid underline and the transmembrane region by dotted underline.

(SEQ ID NO: 597)
ATGAGAGAGCTCGTCAACATTCCACTGGTACATATTCTTACTCTGGTTGCCTTCAGCGGAACTGAGAAACTTCCA
AAAGCTCCTGTCATCACCACTCCTCTTGAAACAGTGGATGCCTTAGTTGAAGAAGTGGCTACTTTCATGTGTGCA
GTGGAATCCTACCCCCAGCCTGAGATTTCCTGGACTAGAAATAAAATTCTCATTAAACTCTTTGACACCCGGTAC
AGCATCCGGGAGAATGGGCAGCTCCTCACCATCCTGAGTGTGGAAGACAGTGATGATGGCATTTACTGCTGCACG
GCCAACAATGGTGTGGGAGGAGCTGTGGAGAGTTGTGGAGCCCTGCAAGTGAAGATGAAACCTAAAATAACTCGT
CCTCCCATAAATGTGAAAATAATAGAGGGATTAAAAGCAGTCCTACCATGTACTACAATGGGTAATCCCAAACCA
TCAGTGTCTTGGATAAAGGGAGACAGCCCTCTCAGGGAAAATTCCCGAATTGCAGTTCTTGAATCTGGGAGCTTG
AGGATTCATAACGTACAAAAGGAAGATGCAGGACAGTATCGATGTGTGGCAAAAAACAGCCTCGGGACAGCATAT
TCCAAAGTGGTGAAGCTGGAAGTTGAGGTTTTTGCCAGGATCCTGCGGGCTCCTGAATCCCACAATGTCACCTTT
GGCTCCTTTGTGACCCTGCACTGTACAGCAACAGGCATTCCTGTCCCCACCATCACCTGGATTGAAAACGGAAAT
GCTGTTTCTTCTGGGTCCATTCAAGAGAGTGTGAAAGACCGAGTGATTGACTCAAGACTGCAGCTGTTTATCACC
AAGCCAGGACTCTACACATGCATAGCTACCAATAAGCATGGGGAGAAGTTCAGTACTGCCAAGGCTGCAGCCACC
ATCAGCATAGCAGAATGGAGTAAACCACAGAAAGATAACAAAGGCTACTGCGCCCAGTACAGAGGGGAGGTGTGT
AATGCAGTCCTGGCAAAAGATGCTCTTGTTTTTCTCAACACCTCCTATGCGGACCCTGAGGAGGCCCAAGAGCTA
CTGGTCCACACGGCCTGGAATGAACTGAAAGTAGTGAGCCCAGTCTGCCGGCCAGCTGCTGAGGCTTTGTTGTGT
AACCACATCTTCCAGGAGTGCAGTCCTGGAGTAGTGCCTACTCCTATTCCCATTTGCAGAGAGTACTGCTTGGCA
GTAAAGGAGCTCTTCTGCGCAAAAGAATGGCTGGTAATGGAAGAGAAGACCCACAGAGGACTCTACAGATCCGAG
ATGCATTTGCTGTCCGTGCCAGAATGCAGCAAGCTTCCCAGCATGCATTGGGACCCCACGGCCTGTGCCAGACTG
CCACATCTAGATTATAACAAAGAAAACCTAAAAACATTCCCACCAATGACGTCCTCAAAGCCAAGTGTGGACATT

[chemical structure]

[chemical structure]

AATAAGAAAAGAGAATCAGCAGCAGTAACCCTCACCACACTGCCTTCTGAGCTCTTACTAGATAGACTTCATCCC
AACCCCATGTACCAGAGGATGCCGCTCCTTCTGAACCCCAAATTGCTCAGCCTGGAGTATCCAAGGAATAACATT
GAATATGTGAGAGACATCGGAGAGGGAGCGTTTGGAAGGGTGTTTCAAGCAAGGGCACCAGGCTTACTTCCCTAT
GAACCTTTCACTATGGTGGCAGTAAAGATGCTCAAAGAAGAAGCCTCGGCAGATATGCAAGCGGACTTTCAGAGG
GAGGCAGCCCTCATGGCAGAATTTGACAACCCTAACATTGTGAAGCTATTAGGAGTGTGTGCTGTCGGGAAGCCA
ATGTGCCTGCTCTTTGAATACATGGCCTATGGTGACCTCAATGAGTTCCTCCGCAGCATGTCCCCTCACACCGTG
TGCAGCCTCAGTCACAGTGACTTGTCTATGAGGGCTCAGGTCTCCAGCCCTGGGCCCCCACCCCTCTCCTGTGCT
GAGCAGCTTTGCATTGCCAGGCAGGTGGCAGCTGGCATGGCTTACCTCTCAGAACGTAAGTTTGTTCACCGAGAT
TTAGCCACCAGGAACTGCCTGGTGGGCGAGAACATGGTGGTGAAAATTGCCGACTTTGGCCTCTCCAGGAACATC
TACTCAGCAGACTACTACAAAGCTAATGAAAACGACGCTATCCCTATCCGTTGGATGCCACCAGAGTCCATTTTT
TATAACCGCTACACTACAGAGTCTGATGTGTGGGCCTATGGCGTGGTCCTCTGGGAGATCTTCTCCTATGGCCTG
CAGCCCTACTATGGGATGGCCCATGAGGAGGTCATTTACTACGTGCGAGATGGCAACATCCTCTCCTGCCCTGAG
AACTGCCCCGTGGAGCTGTACAATCTCATGCGTCTATGTTGGAGCAAGCTGCCTGCAGACAGACCCAGTTTCACC
AGTATTCACCGAATTCTGGAACGCATGTGTGAGAGGGCAGAGGGAACTGTGAGTGTC

[0600] A nucleic acid sequence encoding a processed extracellular domain of MuSK isoform 1 is shown below (SEQ ID NO: 598):

(SEQ ID NO: 598)
GGAACTGAGAAACTTCCAAAAGCTCCTGTCATCACCACTCCTCTTGAAAC
AGTGGATGCCTTAGTTGAAGAAGTGGCTACTTTCATGTGTGCAGTGGAAT
CCTACCCCCAGCCTGAGATTTCCTGGACTAGAAATAAAATTCTCATTAAA
CTCTTTGACACCCGGTACAGCATCCGGGAGAATGGGCAGCTCCTCACCAT
CCTGAGTGTGGAAGACAGTGATGATGGCATTTACTGCTGCACGGCCAACA
ATGGTGTGGGAGGAGCTGTGGAGAGTTGTGGAGCCCTGCAAGTGAAGATG
AAACCTAAAATAACTCGTCCTCCCATAAATGTGAAAATAATAGAGGGATT
AAAAGCAGTCCTACCATGTACTACAATGGGTAATCCCAAACCATCAGTGT
CTTGGATAAAGGGAGACAGCCCTCTCAGGGAAAATTCCCGAATTGCAGTT
CTTGAATCTGGGAGCTTGAGGATTCATAACGTACAAAAGGAAGATGCAGG
ACAGTATCGATGTGTGGCAAAAAACAGCCTCGGGACAGCATATTCCAAAG
TGGTGAAGCTGGAAGTTGAGGTTTTTGCCAGGATCCTGCGGGCTCCTGAA
TCCCACAATGTCACCTTTGGCTCCTTTGTGACCCTGCACTGTACAGCAAC
AGGCATTCCTGTCCCCACCATCACCTGGATTGAAAACGGAAATGCTGTTT
CTTCTGGGTCCATTCAAGAGAGTGTGAAAGACCGAGTGATTGACTCAAGA
CTGCAGCTGTTTATCACCAAGCCAGGACTCTACACATGCATAGCTACCAA
TAAGCATGGGGAGAAGTTCAGTACTGCCAAGGCTGCAGCCACCATCAGCA
TAGCAGAATGGAGTAAACCACAGAAAGATAACAAAGGCTACTGCGCCCAG
TACAGAGGGGAGGTGTGTAATGCAGTCCTGGCAAAAGATGCTCTTGTTTT
TCTCAACACCTCCTATGCGGACCCTGAGGAGGCCCAAGAGCTACTGGTCC
ACACGGCCTGGAATGAACTGAAAGTAGTGAGCCCAGTCTGCCGGCCAGCT
GCTGAGGCTTTGTTGTGTAACCACATCTTCCAGGAGTGCAGTCCTGGAGT
AGTGCCTACTCCTATTCCCATTTGCAGAGAGTACTGCTTGGCAGTAAAGG
AGCTCTTCTGCGCAAAAGAATGGCTGGTAATGGAAGAGAAGACCCACAGA
GGACTCTACAGATCCGAGATGCATTTGCTGTCCGTGCCAGAATGCAGCAA
GCTTCCCAGCATGCATTGGGACCCCACGGCCTGTGCCAGACTGCCACATC
TAGATTATAACAAAGAAAACCTAAAAACATTCCCACCAATGACGTCCTCA
AAGCCAAGTGTGGACATTCCAAATCTGCCTTCCTCCTCCTCTTCTTCCTT
CTCTGTCTCACCTACATACTCCATGACT

[0601] A human MuSK isoform 2 precursor protein sequence (NCBI Reference Sequence NP_001159752.1) is as follows:

| (SEQ ID NO: 599) | |
|---|---|
| 1 | MRELVNIPLV HILTLVAFSG TEKLPKAPVI TTPLETVDAL VEEVATFMCA |
| 51 | VESYPQPEIS WTRNKILIKL FDTRYSIREN GQLLTILSVE DSDDGIYCCT |
| 101 | ANNGVGGAVE SCGALQVKMK PKITRPPINV KIIEGLKAVL PCTTMGNPKP |
| 151 | SVSWIKGDSP LRENSRIAVL ESGSLRIHNV QKEDAGQYRC VAKNSLGTAY |
| 201 | SKVVKLEVEE ESEPEQDTKV FARILRAPES HNVTFGSFVT LHCTATGIPV |
| 251 | PTITWIENGN AVSSGSIQES VEDRVIDSRL QLFITKPGLY TCIATNKHGE |
| 301 | KFSTAKAAAT ISIAEWREYC LAVKELFCAK EWLVMEEKTH RGLYRSEMHL |
| 351 | LSVPECSKLP SMHWDPTACA RLPHLAFPPM TSSKPSVDIP NLPSSSSSSF |
| 401 | [chemical structure] |
| 451 | TTLPSELLLD RLHPNPMYQR MPLLLNPKLL SLEYPRNNIE YVRDIGEGAF |
| 501 | GRVFQARAPG LLPYEPFTMV AVKMLKEEAS ADMQADFQRE AALMAEFDNP |
| 551 | NIVKLLGVCA VGKPMCLLFE YMAYGDLNEF LRSMSPHTVC SLSHSDLSMR |
| 601 | AQVSSPGPPP LSCAEQLCIA RQVAAGMAYL SERKFVHRDL ATRNCLVGEN |
| 651 | MVVKIADFGL SRNIYSADYY KANENDAIPI RWMPPESIFY NRYTTESDVW |
| 701 | AYGVVLWEIF SYGLQPYYGM AHEEVIYYVR DGNILSCPEN CPVELYNLMR |
| 751 | LCWSKLPADR PSFTSIHRIL ERMCERAEGT VSV |

[0602] The signal peptide is indicated by single underline, the extracellular domain is indicated in bold font, and the transmembrane domain is indicated by dotted underline. This variant contains an alternate in-frame exon and lacks an alternate in-frame exon in the middle portion of the coding region compared to variant 1. The encoded isoform 2 is shorter than isoform 1.

[0603] A mature MuSK isoform 2 polypeptide sequence (SEQ ID NO: 600) is as follows:

| (SEQ ID NO: 600) | |
|---|---|
| 1 | GTEKLPKAPV ITTPLETVDA LVEEVATFMC AVESYPQPEI SWTRNKILIK |
| 51 | LFDTRYSIRE NGQLLTILSV EDSDDGIYCC TANNGVGGAV ESCGALQVKM |
| 101 | KPKITRPPIN VKIIEGLKAV LPCTTMGNPK PSVSWIKGDS PLRENSRIAV |
| 151 | LESGSLRIHN VQKEDAGQYR CVAKNSLGTA YSKVVKLEVE EESEPEQDTK |
| 201 | VFARILRAPE SHNVTFGSFV TLHCTATGIP VPTITWIENG NAVSSGSIQE |
| 251 | SVKDRVIDSR LQLFITKPGL YTCIATNKHG EKFSTAKAAA TISIAEWREY |
| 301 | CLAVKELFCA KEWLVMEEKT HRGLYRSEMH LLSVPECSKL PSMHWDPTAC |
| 351 | ARLPHLAFPP MTSSKPSVDI PNLPSSSSSS FSVSPTYSMT |

[0604] A nucleic acid sequence encoding the unprocessed precursor protein of human MuSK isoform 2 is shown below (SEQ ID NO: 601), corresponding to nucleotides 135-2483 of NCBI Reference Sequence NM_001166280.1. The signal sequence is indicated by solid underline and the transmembrane region by dotted underline.

(SEQ ID NO: 601)
ATGAGAGAGCTCGTCAACATTCCACTGGTACATATTCTTACTCTGGTTGCCTTCAGCGGAACTGAGAAACTTCCA
AAAGCTCCTGTCATCACCACTCCTCTTGAAACAGTGGATGCCTTAGTTGAAGAAGTGGCTACTTTCATGTGTGCA
GTGGAATCCTACCCCCAGCCTGAGATTTCCTGGACTAGAAATAAAATTCTCATTAAACTCTTTGACACCCGGTAC
AGCATCCGGGAGAATGGGCAGCTCCTCACCATCCTGAGTGTGGAAGACAGTGATGATGGCATTTACTGCTGCACG
GCCAACAATGGTGTGGGAGGAGCTGTGGAGAGTTGTGGAGCCCTGCAAGTGAAGATGAAACCTAAAATAACTCGT
CCTCCCATAAATGTGAAAATAATAGAGGGATTAAAAGCAGTCCTACCATGTACTACAATGGGTAATCCCAAACCA
TCAGTGTCTTGGATAAAGGGAGACAGCCCTCTCAGGGAAAATTCCCGAATTGCAGTTCTTGAATCTGGGAGCTTG
AGGATTCATAACGTACAAAAGGAAGATGCAGGACAGTATCGATGTGTGGCAAAAAACAGCCTCGGGACAGCATAT
TCCAAAGTGGTGAAGCTGGAAGTTGAGGAAGAAAGTGAACCCGAACAAGATACTAAAGTTTTTGCCAGGATCCTG
CGGGCTCCTGAATCCCACAATGTCACCTTTGGCTCCTTTGTGACCCTGCACTGTACAGCAACAGGCATTCCTGTC
CCCACCATCACCTGGATTGAAAACGGAAATGCTGTTTCTTCTGGGTCCATTCAAGAGAGTGTGAAAGACCGAGTG
ATTGACTCAAGACTGCAGCTGTTTATCACCAAGCCAGGACTCTACACATGCATAGCTACCAATAAGCATGGGGAG
AAGTTCAGTACTGCCAAGGCTGCAGCCACCATCAGCATAGCAGAATGGAGAGAGTACTGCTTGGCAGTAAAGGAG
CTCTTCTGCGCAAAAGAATGGCTGGTAATGGAAGAGAAGACCCACAGAGGACTCTACAGATCCGAGATGCATTTG
CTGTCCGTGCCAGAATGCAGCAAGCTTCCCAGCATGCATTGGGACCCCACGGCCTGTGCCAGACTGCCACATCTA
GCATTCCCACCAATGACGTCCTCAAAGCCAAGTGTGGACATTCCAAATCTGCCTTCCTCCTCCTCTTCTTCCTTC

[chemical structure]

[chemical structure]

ACCACACTGCCTTCTGAGCTCTTACTAGATAGACTTCATCCCAACCCCATGTACCAGAGGATGCCGCTCCTTCTG
AACCCCAAATTGCTCAGCCTGGAGTATCCAAGGAATAACATTGAATATGTGAGAGACATCGGAGAGGGAGCGTTT
GGAAGGGTGTTTCAAGCAAGGGCACCAGGCTTACTTCCCTATGAACCTTTCACTATGGTGGCAGTAAAGATGCTC
AAAGAAGAAGCCTCGGCAGATATGCAAGCGGACTTTCAGAGGGAGGCAGCCCTCATGGCAGAATTTGACAACCCT
AACATTGTGAAGCTATTAGGAGTGTGTGCTGTCGGGAAGCCAATGTGCCTGCTCTTTGAATACATGGCCTATGGT
GACCTCAATGAGTTCCTCCGCAGCATGTCCCCTCACACCGTGTGCAGCCTCAGTCACAGTGACTTGTCTATGAGG
GCTCAGGTCTCCAGCCCTGGGCCCCCACCCCTCTCCTGTGCTGAGCAGCTTTGCATTGCCAGGCAGGTGGCAGCT
GGCATGGCTTACCTCTCAGAACGTAAGTTTGTTCACCGAGATTTAGCCACCAGGAACTGCCTGGTGGGCGAGAAC
ATGGTGGTGAAAATTGCCGACTTTGGCCTCTCCAGGAACATCTACTCAGCAGACTACTACAAAGCTAATGAAAAC
GACGCTATCCCTATCCGTTGGATGCCACCAGAGTCCATTTTTTATAACCGCTACACTACAGAGTCTGATGTGTGG
GCCTATGGCGTGGTCCTCTGGGAGATCTTCTCCTATGGCCTGCAGCCCTACTATGGGATGGCCCATGAGGAGGTC
ATTTACTACGTGCGAGATGGCAACATCCTCTCCTGCCCTGAGAACTGCCCCGTGGAGCTGTACAATCTCATGCGT
CTATGTTGGAGCAAGCTGCCTGCAGACAGACCCAGTTTCACCAGTATTCACCGAATTCTGGAACGCATGTGTGAG
AGGGCAGAGGGAACTGTGAGTGTC

[0605] A nucleic acid sequence encoding a processed extracellular domain of MuSK isoform 2 is shown below (SEQ ID NO: 602):

(SEQ ID NO: 602)
GGAACTGAGAAACTTCCAAAAGCTCCTGTCATCACCACTCCTCTTGAAAC
AGTGGATGCCTTAGTTGAAGAAGTGGCTACTTTCATGTGTGCAGTGGAAT
CCTACCCCCAGCCTGAGATTTCCTGGACTAGAAATAAAATTCTCATTAAA
CTCTTTGACACCCGGTACAGCATCCGGGAGAATGGGCAGCTCCTCACCAT
CCTGAGTGTGGAAGACAGTGATGATGGCATTTACTGCTGCACGGCCAACA
ATGGTGTGGGAGGAGCTGTGGAGAGTTGTGGAGCCCTGCAAGTGAAGATG
AAACCTAAAATAACTCGTCCTCCCATAAATGTGAAAATAATAGAGGGATT
AAAAGCAGTCCTACCATGTACTACAATGGGTAATCCCAAACCATCAGTGT
CTTGGATAAAGGGAGACAGCCCTCTCAGGGAAAATTCCCGAATTGCAGTT
CTTGAATCTGGGAGCTTGAGGATTCATAACGTACAAAAGGAAGATGCAGG
ACAGTATCGATGTGTGGCAAAAAACAGCCTCGGGACAGCATATTCCAAAG
TGGTGAAGCTGGAAGTTGAGGAAGAAAGTGAACCCGAACAAGATACTAAA
GTTTTTGCCAGGATCCTGCGGGCTCCTGAATCCCACAATGTCACCTTTGG
CTCCTTTGTGACCCTGCACTGTACAGCAACAGGCATTCCTGTCCCCACCA
TCACCTGGATTGAAAACGGAAATGCTGTTTCTTCTGGGTCCATTCAAGAG
AGTGTGAAAGACCGAGTGATTGACTCAAGACTGCAGCTGTTTATCACCAA
GCCAGGACTCTACACATGCATAGCTACCAATAAGCATGGGGAGAAGTTCA
GTACTGCCAAGGCTGCAGCCACCATCAGCATAGCAGAATGGAGAGAGTAC
TGCTTGGCAGTAAAGGAGCTCTTCTGCGCAAAAGAATGGCTGGTAATGGA
AGAGAAGACCCACAGAGGACTCTACAGATCCGAGATGCATTTGCTGTCCG
TGCCAGAATGCAGCAAGCTTCCCAGCATGCATTGGGACCCCACGGCCTGT
GCCAGACTGCCACATCTAGCATTCCCACCAATGACGTCCTCAAAGCCAAG
TGTGGACATTCCAAATCTGCCTTCCTCCTCCTCTTCTTCCTTCTCTGTCT
CACCTACATACTCCATGACT

[0606] A human MuSK isoform 3 precursor protein sequence (NCBI Reference Sequence NP_001159753.1) is as follows:

| (SEQ ID NO: 603) | |
|---|---|
| 1 | MRELVNIPLV HILTLVAFSG TEKLPKAPVI TTPLETVDAL VEEVATFMCA |
| 51 | VESYPQPEIS WTRNKILIKL FDTRYSIREN GQLLTILSVE DSDDGIYCCT |
| 101 | ANNGVGGAVE SCGALQVKMK PKITRPPINV KIIEGLKAVL PCTTMGNPKP |
| 151 | SVSWIKGDSP LRENSRIAVL ESGSLRIHNV QKEDAGQYRC VAKNSLGTAY |
| 201 | SKVVKLEVEV FARILRAPES HNVTFGSFVT LHCTATGIPV PTITWIENGN |
| 251 | AVSSGSIQES VKDRVIDSRL QLFITKPGLY TCIATNKHGE KFSTAKAAAT |
| 301 | ISIAEWREYC LAVKELFCAK EWLVMEEKTH RGLYRSEMHL LSVPECSKLP |
| 351 | [chemical structure] |
| 401 | [chemical structure] |
| 451 | RLHPNPMYQR MPLLLNPKLL SLEYPRNNIE YVRDIGEGAF GRVFQARAPG |
| 501 | LLPYEPFTMV AVKMLKEEAS ADMQADFQRE AALMAEFDNP NIVKLLGVCA |
| 551 | VGKPMCLLFE YMAYGDLNEF LRSMSPHTVC SLSHSDLSMR AQVSSPGPPP |
| 601 | LSCAEQLCIA RQVAAGMAYL SERKFVHRDL ATRNCLVGEN MVVKIADFGL |
| 651 | SRNIYSADYY KANENDAIPI RWMPPESIFY NRYTTESDVW AYGVVLWEIF |
| 701 | SYGLQPYYGM AHEEVIYYVR DGNILSCPEN CPVELYNLMR LCWSKLPADR |
| 751 | PSFTSIHRIL ERMCERAEGT VSV |

[0607] The signal peptide is indicated by single underline, the extracellular domain is indicated in bold font, and the transmembrane domain is indicated by dotted underline. This variant lacks an alternate in-frame exon in the middle portion of the coding region compared to variant 1. The encoded isoform 3 is shorter than isoform 1.

[0608] A processed MuSK isoform 3 polypeptide sequence (SEQ ID NO: 604) is as follows:

| (SEQ ID NO: 604) | |
|---|---|
| 1 | GTEKLPKAPV ITTPLETVDA LVEEVATFMC AVESYPQPEI SWTRNKILIK |
| 51 | LFDTRYSIRE NGQLLTILSV EDSDDGIYCC TANNGVGGAV ESCGALQVKM |
| 101 | KPKITRPPIN VKIIEGLKAV LPCTTMGNPK PSVSWIKGDS PLRENSRIAV |
| 151 | LESGSLRIHN VQKEDAGQYR CVAKNSLGTA YSKVVKLEVE VFARILRAPE |
| 201 | SHNVTFGSFV TLHCTATGIP VPTITWIENG NAVSSGSIQE SVKDRVIDSR |
| 251 | LQLFITKPGL YTCIATNKHG EKFSTAKAAA TISIAEWREY CLAVKELFCA |
| 301 | KEWLVMEEKT HRGLYRSEMH LLSVPECSKL PSMHWDPTAC ARLPHLAFPP |
| 351 | MTSSKPSVDI PNLPSSSSSS FSVSPTYSMT |

[0609] A nucleic acid sequence encoding the unprocessed precursor protein of human MuSK isoform 3 is shown below (SEQ ID NO: 605), corresponding to nucleotides 135-2453 of NCBI Reference Sequence NM_001166281.1. The signal sequence is indicated by solid underline and the transmembrane region by dotted underline.

(SEQ ID NO: 605)
ATGAGAGAGCTCGTCAACATTCCACTGGTACATATTCTTACTCTGGTTGCCTTCAGCGGAACTGAGAAACTTCCA
AAAGCTCCTGTCATCACCACTCCTCTTGAAACAGTGGATGCCTTAGTTGAAGAAGTGGCTACTTTCATGTGTGCA
GTGGAATCCTACCCCCAGCCTGAGATTTCCTGGACTAGAAATAAAATTCTCATTAAACTCTTTGACACCCGGTAC
AGCATCCGGGAGAATGGGCAGCTCCTCACCATCCTGAGTGTGGAAGACAGTGATGATGGCATTTACTGCTGCACG
GCCAACAATGGTGTGGGAGGAGCTGTGGAGAGTTGTGGAGCCCTGCAAGTGAAGATGAAACCTAAAATAACTCGT
CCTCCCATAAATGTGAAAATAATAGAGGGATTAAAAGCAGTCCTACCATGTACTACAATGGGTAATCCCAAACCA
TCAGTGTCTTGGATAAAGGGAGACAGCCCTCTCAGGGAAAATTCCCGAATTGCAGTTCTTGAATCTGGGAGCTTG
AGGATTCATAACGTACAAAAGGAAGATGCAGGACAGTATCGATGTGTGGCAAAAAACAGCCTCGGGACAGCATAT
TCCAAAGTGGTGAAGCTGGAAGTTGAGGTTTTTGCCAGGATCCTGCGGGCTCCTGAATCCCACAATGTCACCTTT
GGCTCCTTTGTGACCCTGCACTGTACAGCAACAGGCATTCCTGTCCCCACCATCACCTGGATTGAAAACGGAAAT
GCTGTTTCTTCTGGGTCCATTCAAGAGAGTGTGAAAGACCGAGTGATTGACTCAAGACTGCAGCTGTTTATCACC
AAGCCAGGACTCTACACATGCATAGCTACCAATAAGCATGGGGAGAAGTTCAGTACTGCCAAGGCTGCAGCCACC
ATCAGCATAGCAGAATGGAGAGAGTACTGCTTGGCAGTAAAGGAGCTCTTCTGCGCAAAAGAATGGCTGGTAATG
GAAGAGAAGACCCACAGAGGACTCTACAGATCCGAGATGCATTTGCTGTCCGTGCCAGAATGCAGCAAGCTTCCC
AGCATGCATTGGGACCCCACGGCCTGTGCCAGACTGCCACATCTAGCATTCCCACCAATGACGTCCTCAAAGCCA

[chemical structure]

[chemical structure]

AAACAATGGAAAAATAAGAAAAGAGAATCAGCAGCAGTAACCCTCACCACACTGCCTTCTGAGCTCTTACTAGAT
AGACTTCATCCCAACCCCATGTACCAGAGGATGCCGCTCCTTCTGAACCCCAAATTGCTCAGCCTGGAGTATCCA
AGGAATAACATTGAATATGTGAGAGACATCGGAGAGGGAGCGTTTGGAAGGGTGTTTCAAGCAAGGGCACCAGGC
TTACTTCCCTATGAACCTTTCACTATGGTGGCAGTAAAGATGCTCAAAGAAGAAGCCTCGGCAGATATGCAAGCG
GACTTTCAGAGGGAGGCAGCCCTCATGGCAGAATTTGACAACCCTAACATTGTGAAGCTATTAGGAGTGTGTGCT
GTCGGGAAGCCAATGTGCCTGCTCTTTGAATACATGGCCTATGGTGACCTCAATGAGTTCCTCCGCAGCATGTCC
CCTCACACCGTGTGCAGCCTCAGTCACAGTGACTTGTCTATGAGGGCTCAGGTCTCCAGCCCTGGGCCCCCACCC
CTCTCCTGTGCTGAGCAGCTTTGCATTGCCAGGCAGGTGGCAGCTGGCATGGCTTACCTCTCAGAACGTAAGTTT
GTTCACCGAGATTTAGCCACCAGGAACTGCCTGGTGGGCGAGAACATGGTGGTGAAAATTGCCGACTTTGGCCTC
TCCAGGAACATCTACTCAGCAGACTACTACAAAGCTAATGAAAACGACGCTATCCCTATCCGTTGGATGCCACCA
GAGTCCATTTTTTATAACCGCTACACTACAGAGTCTGATGTGTGGGCCTATGGCGTGGTCCTCTGGGAGATCTTC
TCCTATGGCCTGCAGCCCTACTATGGGATGGCCCATGAGGAGGTCATTTACTACGTGCGAGATGGCAACATCCTC
TCCTGCCCTGAGAACTGCCCCGTGGAGCTGTACAATCTCATGCGTCTATGTTGGAGCAAGCTGCCTGCAGACAGA
CCCAGTTTCACCAGTATTCACCGAATTCTGGAACGCATGTGTGAGAGGGCAGAGGGAACTGTGAGTGTCTAA

[0610] A nucleic acid sequence encoding a processed extracellular domain of MuSK isoform 3 is shown below (SEQ ID NO: 606):

(SEQ ID NO: 606)
GGAACTGAGAAACTTCCAAAAGCTCCTGTCATCACCACTCCTCTTGAAAC
AGTGGATGCCTTAGTTGAAGAAGTGGCTACTTTCATGTGTGCAGTGGAAT
CCTACCCCCAGCCTGAGATTTCCTGGACTAGAAATAAAATTCTCATTAAA
CTCTTTGACACCCGGTACAGCATCCGGGAGAATGGGCAGCTCCTCACCAT
CCTGAGTGTGGAAGACAGTGATGATGGCATTTACTGCTGCACGGCCAACA
ATGGTGTGGGAGGAGCTGTGGAGAGTTGTGGAGCCCTGCAAGTGAAGATG
AAACCTAAAATAACTCGTCCTCCCATAAATGTGAAAATAATAGAGGGATT
AAAAGCAGTCCTACCATGTACTACAATGGGTAATCCCAAACCATCAGTGT
CTTGGATAAAGGGAGACAGCCCTCTCAGGGAAAATTCCCGAATTGCAGTT
CTTGAATCTGGGAGCTTGAGGATTCATAACGTACAAAAGGAAGATGCAGG
ACAGTATCGATGTGTGGCAAAAAACAGCCTCGGGACAGCATATTCCAAAG
TGGTGAAGCTGGAAGTTGAGGTTTTTGCCAGGATCCTGCGGGCTCCTGAA
TCCCACAATGTCACCTTTGGCTCCTTTGTGACCCTGCACTGTACAGCAAC
AGGCATTCCTGTCCCCACCATCACCTGGATTGAAAACGGAAATGCTGTTT
CTTCTGGGTCCATTCAAGAGAGTGTGAAAGACCGAGTGATTGACTCAAGA
CTGCAGCTGTTTATCACCAAGCCAGGACTCTACACATGCATAGCTACCAA
TAAGCATGGGGAGAAGTTCAGTACTGCCAAGGCTGCAGCCACCATCAGCA
TAGCAGAATGGAGAGAGTACTGCTTGGCAGTAAAGGAGCTCTTCTGCGCA
AAAGAATGGCTGGTAATGGAAGAGAAGACCCACAGAGGACTCTACAGATC
CGAGATGCATTTGCTGTCCGTGCCAGAATGCAGCAAGCTTCCCAGCATGC
ATTGGGACCCCACGGCCTGTGCCAGACTGCCACATCTAGCATTCCCACCA
ATGACGTCCTCAAAGCCAAGTGTGGACATTCCAAATCTGCCTTCCTCCTC
CTCTTCTTCCTTCTCTGTCTCACCTACATACTCCATGACT

[0611] In certain embodiments, the disclosure relates to heteromultimers that comprise at least one MuSK polypeptide, which includes fragments, functional variants, and modified forms thereof. Preferably, MuSK polypeptides for use in accordance with the disclosure (e.g., heteromultimers comprising a MuSK polypeptide and uses thereof) are soluble (e.g., an extracellular domain of MuSK). In other preferred embodiments, MuSK polypeptides for use in accordance with disclosure bind to and/or inhibit (antagonize) activity (e.g., Smad signaling) of one or more TGF-beta superfamily ligands. In some embodiments, heteromultimers of the disclosure comprise at least one MuSK polypeptide that is at least 70%, 75%, 80%, 85%, 90%, 91%, 92%, 93%, 94%, 95%, 96%, 97%, 98%, 99%, or 100% identical to the amino acid sequence of SEQ ID NOs: 595, 596, 598, 599, 600, 603, and 604. In some embodiments, heteromultimers of the disclosure comprise at least one MuSK polypeptide that is at least 70%, 75%, 80%, 85%, 90%, 91%, 92%, 93%, 94%, 95%, 96%, 97%, 98%, 99%, or 100% identical to a polypeptide that begins at any one of amino acids of 21-49 (e.g., amino acid residues 21, 22, 23, 24, 25, 26, 27, 28, 29, 30, 31, 32, 33, 34, 35, 35, 36, 37, 38, 39, 40, 41, 42, 43, 44, 45, 46, 47, 48, or 49) of SEQ ID NO: 595, and ends at any one of amino acids 447-495 (e.g., amino acid residues 447, 448, 449, 450, 451, 452, 453, 454, 455, 456, 457, 458, 459, 460, 461, 462, 463, 464, 465, 466, 467, 468, 469, 470, 471, 472, 473, 474, 475, 476, 477, 478, 479, 480, 481, 482, 483, 484, 485, 486, 487, 488, 489, 490, 491, 492, 493, 494, or 495) of SEQ ID NO: 595. In some embodiments, heteromultimers of the disclosure comprise of at least one MuSK polypeptide that is at least 70%, 75%, 80%, 85%, 90%, 91%, 92%, 93%, 94%, 95%, 96%, 97%, 98%, 99%, or 100% identical to amino acids of 21-495 of SEQ ID NO: 595. In some embodiments, heteromultimers of the disclosure comprise of at least one MuSK polypeptide that is at least 70%, 75%, 80%, 85%, 90%, 91%, 92%, 93%, 94%, 95%, 96%, 97%, 98%, 99%, or 100% identical to amino acids of 49-447 of SEQ ID NO: 595. In some embodiments, heteromultimers of the disclosure comprise of at least one MuSK polypeptide that is at least 70%, 75%, 80%, 85%, 90%, 91%, 92%, 93%, 94%, 95%, 96%, 97%, 98%, 99%, or 100% identical to amino acids of 210-495 of SEQ ID NO: 595. In some embodiments, heteromultimers of the disclosure comprise at least one MuSK polypeptide that is at least 70%, 75%, 80%, 85%, 90%, 91%, 92%, 93%, 94%, 95%, 96%, 97%, 98%, 99%, or 100% identical to a polypeptide that begins at any one of amino acids of 20-49 (e.g., amino acid residues 20, 21, 22, 23, 24, 25, 26, 27, 28, 29, 30, 31, 32, 33, 34, 35, 35, 36, 37, 38, 39, 40, 41, 42, 43, 44, 45, 46, 47, 48, or 49) of SEQ ID NO: 599, and ends at any one of amino acids 369-409 (e.g., amino acid residues 369, 370, 371, 372, 373, 374, 375, 376, 377, 378, 379, 380, 381, 382, 383, 384, 385, 386, 387, 388, 389, 390, 391, 392, 393, 394, 395, 396, 397, 398, 399, 400, 401, 402, 403, 404, 405, 406, 407, 408, or 409) of SEQ ID NO: 599. In some embodiments, heteromultimers of the disclosure comprise of at least one MuSK polypeptide that is at least 70%, 75%, 80%, 85%, 90%, 91%, 92%, 93%, 94%, 95%, 96%, 97%, 98%, 99%, or 100% identical to amino acids of 20-409 of SEQ ID NO: 599. In some embodiments, heteromultimers of the disclosure comprise of at least one MuSK polypeptide that is at least 70%, 75%, 80%, 85%, 90%, 91%, 92%, 93%, 94%, 95%, 96%, 97%, 98%, 99%, or 100% identical to amino acids of 49-369 of SEQ ID NO: 599. In some embodiments, heteromultimers of the disclosure comprise of at least one MuSK polypeptide that is at least 70%, 75%, 80%, 85%, 90%, 91%, 92%, 93%, 94%, 95%, 96%, 97%, 98%, 99%, or 100% identical to amino acids of 210-409 of SEQ ID NO: 599. In some embodiments, heteromultimers of the disclosure comprise at least one MuSK polypeptide that is at least 70%, 75%, 80%, 85%, 90%, 91%, 92%, 93%, 94%, 95%, 96%, 97%, 98%, 99%, or 100% identical to a polypeptide that begins at any one of amino acids of 20-49 (e.g., amino acid residues 20, 21, 22, 23, 24, 25, 26, 27, 28, 29, 30, 31, 32, 33, 34, 35, 35, 36, 37, 38, 39, 40, 41, 42, 43, 44, 45, 46, 47, 48, or 49) of SEQ ID NO: 603, and ends at any one of amino acids 359-399 (e.g., amino acid residues 359, 360, 361, 362, 363, 364, 365, 366, 367, 368, 369, 370, 371, 372, 373, 374, 375, 376, 377, 378, 379, 380, 381, 382, 383, 384, 385, 386, 387, 388, 389, 390, 391, 392, 393, 394, 395, 396, 397, 398, or 399) of SEQ ID NO: 603. In some embodiments, heteromultimers of the disclosure comprise of at least one MuSK polypeptide that is at least 70%, 75%, 80%, 85%, 90%, 91%, 92%, 93%, 94%, 95%, 96%, 97%, 98%, 99%, or 100% identical to amino acids of 20-399 of SEQ ID NO: 603. In some embodiments, heteromultimers of the disclosure comprise of at least one MuSK polypeptide that is at least 70%, 75%, 80%, 85%, 90%, 91%, 92%, 93%, 94%, 95%, 96%, 97%, 98%, 99%, or 100% identical to amino acids of 49-359 of SEQ ID NO: 603. In some embodiments, heteromultimers of the disclosure comprise of at least one MuSK polypeptide that is at least 70%, 75%, 80%, 85%, 90%, 91%, 92%, 93%, 94%, 95%, 96%, 97%, 98%, 99%, or 100% identical to amino acids of 210-399 of SEQ ID NO: 603.

[0612] In some embodiments, the present disclosure contemplates making functional variants by modifying the structure of a TGF-beta superfamily type I receptor polypeptide (e.g., ALK1, ALK2, ALK3, ALK4, ALK5, ALK6, and ALK7), a TGF-beta superfamily type II receptor polypeptide (e.g., ActRIIA, ActRIIB, TGFBRII, BMPRII, and MISRII), and/or a TGF-beta superfamily co-receptor (e.g., endoglin, betaglycan, Cripto-1, Cryptic, Cryptic family protein 1B, CRIM1, CRIM2, BAMBI, BMPER, RGM-A, RGM-B, hemojuvelin, and MuSK) for such purposes as enhancing therapeutic efficacy or stability (e.g., shelf-life and resistance to proteolytic degradation in vivo). Variants can be produced by amino acid substitution, deletion, addition, or combinations thereof. For instance, it is reasonable to expect that an isolated replacement of a leucine with an isoleucine or valine, an aspartate with a glutamate, a threonine with a serine, or a similar replacement of an amino acid with a structurally related amino acid (e.g., conservative mutations) will not have a major effect on the biological activity of the resulting molecule. Conservative replacements are those that take place within a family of amino acids that are related in their side chains. Whether a change in the amino acid sequence of a polypeptide of the disclosure results in a functional homolog can be readily determined by assessing the ability of the variant polypeptide to produce a response in cells in a fashion similar to the wild-type polypeptide, or to bind to one or more TGF-beta superfamily ligands including, for example, BMP2, BMP2/7, BMP3, BMP4, BMP4/7, BMP5, BMP6, BMP7, BMP8a, BMP8b, BMP9, BMP10, GDF3, GDF5, GDF6/BMP13, GDF7, GDF8, GDF9b/BMP15, GDF11/BMP11, GDF15/MIC1, TGF-β1, TGF-β2, TGF-β3, activin A, activin B, activin C, activin E, activin AB, activin AC, activin AE, activin BC, activin BE, nodal, glial cell-derived neurotrophic factor (GDNF), neurturin, artemin, persephin, MIS, and Lefty.

[0613] In some embodiments, the present disclosure contemplates making functional variants by modifying the structure of the TGF-beta superfamily type I receptor polypeptide, TGF-beta superfamily type II receptor polypeptide, and/or TGF-beta superfamily co-receptor polypeptide for such purposes as enhancing therapeutic efficacy or stability (e.g., increased shelf-life and/or increased resistance to proteolytic degradation).

[0614] In certain embodiments, the present disclosure contemplates specific mutations of a TGF-beta superfamily type I receptor polypeptide (e.g., ALK1, ALK2, ALK3, ALK4, ALK5, ALK6, and ALK7), a TGF-beta superfamily type II receptor polypeptide (e.g., ActRIIA, ActRIIB, TGFBRII, BMPRII, and MISRII), and/or a TGF-beta superfamily co-receptor polypeptide (e.g., endoglin, betaglycan, Cripto-1, Cryptic, Cryptic family protein 1B, CRIM1, CRIM2, BAMBI, BMPER, RGM-A, RGM-B, MuSK, and hemojuvelin) of the disclosure so as to alter the glycosylation of the polypeptide. Such mutations may be selected so as to introduce or eliminate one or more glycosylation sites, such as O-linked or N-linked glycosylation sites. Asparagine-linked glycosylation recognition sites generally comprise a tripeptide sequence, asparagine-X-threonine or asparagine-X-serine (where “X” is any amino acid) which is specifically recognized by appropriate cellular glycosylation enzymes. The alteration may also be made by the addition of, or substitution by, one or more serine or threonine residues to the sequence of the polypeptide (for O-linked glycosylation sites). A variety of amino acid substitutions or deletions at one or both of the first or third amino acid positions of a glycosylation recognition site (and/or amino acid deletion at the second position) results in non-glycosylation at the modified tripeptide sequence. Another means of increasing the number of carbohydrate moieties on a polypeptide is by chemical or enzymatic coupling of glycosides to the polypeptide. Depending on the coupling mode used, the sugar(s) may be attached to (a) arginine and histidine; (b) free carboxyl groups; (c) free sulfhydryl groups such as those of cysteine; (d) free hydroxyl groups such as those of serine, threonine, or hydroxyproline; (e) aromatic residues such as those of phenylalanine, tyrosine, or tryptophan; or (f) the amide group of glutamine. Removal of one or more carbohydrate moieties present on a polypeptide may be accomplished chemically and/or enzymatically. Chemical deglycosylation may involve, for example, exposure of a polypeptide to the compound trifluoromethanesulfonic acid, or an equivalent compound. This treatment results in the cleavage of most or all sugars except the linking sugar (N-acetylglucosamine or N-acetylgalactosamine), while leaving the amino acid sequence intact. Enzymatic cleavage of carbohydrate moieties on polypeptides can be achieved by the use of a variety of endo- and exo-glycosidases as described by Thotakura et al. [Meth. Enzymol. (1987) 138:350]. The sequence of a polypeptide may be adjusted, as appropriate, depending on the type of expression system used, as mammalian, yeast, insect, and plant cells may all introduce differing glycosylation patterns that can be affected by the amino acid sequence of the peptide. In general, heteromultimers of the disclosure for use in humans may be expressed in a mammalian cell line that provides proper glycosylation, such as HEK293 or CHO cell lines, although other mammalian expression cell lines are expected to be useful as well.

[0615] The present disclosure further contemplates a method of generating mutants, particularly sets of combinatorial mutants of a TGF-beta superfamily type I receptor polypeptide (e.g., ALK1, ALK2, ALK3, ALK4, ALK5, ALK6, and ALK7), a TGF-beta superfamily type II receptor polypeptide (e.g., ActRIIA, ActRIIB, TGFBRII, BMPRII, and MISRII), and/or TGF-beta superfamily co-receptor polypeptide (e.g., endoglin, betaglycan, Cripto-1, Cryptic, Cryptic family protein 1B, CRIM1, CRIM2, BAMBI, BMPER, RGM-A, RGM-B, MuSK, and hemojuvelin) of the present disclosure, as well as truncation mutants. Pools of combinatorial mutants are especially useful for identifying functionally active (e.g., ligand binding) TGF-beta superfamily type I receptor, TGF-beta superfamily type II receptor, and/or TGF-beta superfamily co-receptor sequences. The purpose of screening such combinatorial libraries may be to generate, for example, polypeptides variants which have altered properties, such as altered pharmacokinetic or altered ligand binding. A variety of screening assays are provided below, and such assays may be used to evaluate variants. For example, TGF-beta co-receptor variants may be screened for ability to bind to a TGF-beta superfamily ligand (e.g., BMP2, BMP2/7, BMP3, BMP4, BMP4/7, BMP5, BMP6, BMP7, BMP8a, BMP8b, BMP9, BMP10, GDF3, GDF5, GDF6/BMP13, GDF7, GDF8, GDF9b/BMP15, GDF11/BMP11, GDF15/MIC1, TGF-β1, TGF-β2, TGF-β3, activin A, activin B, activin C, activin E, activin AB, activin AC, activin AE, activin BC, activin BE, nodal, glial cell-derived neurotrophic factor (GDNF), neurturin, artemin, persephin, MIS, and Lefty), to prevent binding of a TGF-beta superfamily ligand to a TGF-beta superfamily co-receptor, and/or to interfere with signaling caused by an TGF-beta superfamily ligand.

[0616] The activity of a TGF-beta superfamily heteromultimers of the disclosure also may be tested, for example in a cell-based or in vivo assay. For example, the effect of a heteromultimer on the expression of genes or the activity of proteins involved in muscle production in a muscle cell may be assessed. This may, as needed, be performed in the presence of one or more recombinant TGF-beta superfamily ligand proteins (e.g., BMP2, BMP2/7, BMP3, BMP4, BMP4/7, BMP5, BMP6, BMP7, BMP8a, BMP8b, BMP9, BMP10, GDF3, GDF5, GDF6/BMP13, GDF7, GDF8, GDF9b/BMP15, GDF11/BMP11, GDF15/MIC1, TGF-β1, TGF-β2, TGF-β3, activin A, activin B, activin C, activin E, activin AB, activin AC, activin AE, activin BC, activin BE, nodal, glial cell-derived neurotrophic factor (GDNF), neurturin, artemin, persephin, MIS, and Lefty), and cells may be transfected so as to produce a TGF-beta superfamily heteromultimer, and optionally, a TGF-beta superfamily ligand. Likewise, a heteromultimer of the disclosure may be administered to a mouse or other animal, and one or more measurements, such as muscle formation and strength may be assessed using art-recognized methods. Similarly, the activity of a heteromultimer, or variants thereof, may be tested in osteoblasts, adipocytes, and/or neuronal cells for any effect on growth of these cells, for example, by the assays as described herein and those of common knowledge in the art. A SMAD-responsive reporter gene may be used in such cell lines to monitor effects on downstream signaling.

[0617] Combinatorial-derived variants can be generated which have increased selectivity or generally increased potency relative to a reference TGF-beta superfamily heteromultimer. Such variants, when expressed from recombinant DNA constructs, can be used in gene therapy protocols. Likewise, mutagenesis can give rise to variants which have intracellular half-lives dramatically different than the corresponding unmodified TGF-beta superfamily heteromultimer. For example, the altered protein can be rendered either more stable or less stable to proteolytic degradation or other cellular processes which result in destruction, or otherwise inactivation, of an unmodified polypeptide. Such variants, and the genes which encode them, can be utilized to alter polypeptide complex levels by modulating the half-life of the polypeptide. For instance, a short half-life can give rise to more transient biological effects and, when part of an inducible expression system, can allow tighter control of recombinant polypeptide complex levels within the cell. In an Fc fusion protein, mutations may be made in the linker (if any) and/or the Fc portion to alter one or more activities of the TGF-beta superfamily heteromultimer including, for example, immunogenicity, half-life, and solubility.

[0618] A combinatorial library may be produced by way of a degenerate library of genes encoding a library of polypeptides which each include at least a portion of potential TGF-beta superfamily type I receptor polypeptide, type II receptor polypeptide, and/or co-receptor polypeptide sequences. For instance, a mixture of synthetic oligonucleotides can be enzymatically ligated into gene sequences such that the degenerate set of potential TGF-beta superfamily type I receptor polypeptide, type II receptor polypeptide, and/or co-receptor encoding nucleotide sequences are expressible as individual polypeptides, or alternatively, as a set of larger fusion proteins (e.g., for phage display).

[0619] There are many ways by which the library of potential homologs can be generated from a degenerate oligonucleotide sequence. Chemical synthesis of a degenerate gene sequence can be carried out in an automatic DNA synthesizer, and the synthetic genes can then be ligated into an appropriate vector for expression. The synthesis of degenerate oligonucleotides is well known in the art. See, e.g., Narang, S A (1983) Tetrahedron 39:3; Itakura et al. (1981) Recombinant DNA, Proc. 3rd Cleveland Sympos. Macromolecules, ed. AG Walton, Amsterdam: Elsevier pp 273-289; Itakura et al. (1984) Annu. Rev. Biochem. 53:323; Itakura et al. (1984) Science 198:1056; Ike et al. (1983) Nucleic Acid Res. 11:477. Such techniques have been employed in the directed evolution of other proteins. See, e.g., Scott et al., (1990) Science 249:386-390; Roberts et al. (1992) PNAS USA 89:2429-2433; Devlin et al. (1990) Science 249: 404-406; Cwirla et al., (1990) PNAS USA 87: 6378-6382; as well as U.S. Pat. Nos. 5,223,409, 5,198,346, and 5,096,815.

[0620] Alternatively, other forms of mutagenesis can be utilized to generate a combinatorial library. For example, heteromultimers of the disclosure can be generated and isolated from a library by screening using, for example, alanine scanning mutagenesis [see, e.g., Ruf et al. (1994) Biochemistry 33:1565-1572; Wang et al. (1994) J. Biol. Chem. 269:3095-3099; Balint et al. (1993) Gene 137:109-118; Grodberg et al. (1993) Eur. J. Biochem. 218:597-601; Nagashima et al. (1993) J. Biol. Chem. 268:2888-2892; Lowman et al. (1991) Biochemistry 30:10832-10838; and Cunningham et al. (1989) Science 244:1081-1085], by linker scanning mutagenesis [see, e.g., Gustin et al. (1993) Virology 193:653-660; and Brown et al. (1992) Mol. Cell Biol. 12:2644-2652; McKnight et al. (1982) Science 232:316], by saturation mutagenesis [see, e.g., Meyers et al., (1986) Science 232:613]; by PCR mutagenesis [see, e.g., Leung et al. (1989) Method Cell Mol Biol 1:11-19]; or by random mutagenesis, including chemical mutagenesis [see, e.g., Miller et al. (1992) A Short Course in Bacterial Genetics, CSHL Press, Cold Spring Harbor, N.Y.; and Greener et al. (1994) Strategies in Mol Biol 7:32-34]. Linker scanning mutagenesis, particularly in a combinatorial setting, is an attractive method for identifying truncated (bioactive) forms of TGF-beta superfamily type I receptor, type II receptor, and/or co-receptor polypeptides.

[0621] A wide range of techniques are known in the art for screening gene products of combinatorial libraries made by point mutations and truncations, and, for that matter, for screening cDNA libraries for gene products having a certain property. Such techniques will be generally adaptable for rapid screening of the gene libraries generated by the combinatorial mutagenesis of heteromultimers of the disclosure. The most widely used techniques for screening large gene libraries typically comprise cloning the gene library into replicable expression vectors, transforming appropriate cells with the resulting library of vectors, and expressing the combinatorial genes under conditions in which detection of a desired activity facilitates relatively easy isolation of the vector encoding the gene whose product was detected. Preferred assays include TGF-beta superfamily ligand (e.g., BMP2, BMP2/7, BMP3, BMP4, BMP4/7, BMP5, BMP6, BMP7, BMP8a, BMP8b, BMP9, BMP10, GDF3, GDF5, GDF6/BMP13, GDF7, GDF8, GDF9b/BMP15, GDF11/BMP11, GDF15/MIC1, TGF-β1, TGF-β2, TGF-β3, activin A, activin B, activin C, activin E, activin AB, activin AC, activin AE, activin BC, activin BE, nodal, glial cell-derived neurotrophic factor (GDNF), neurturin, artemin, persephin, MIS, and Lefty) binding assays and/or TGF-beta superfamily ligand-mediated cell signaling assays.

[0622] In certain embodiments, heteromultimers of the disclosure may further comprise post-translational modifications in addition to any that are naturally present in the TGF-beta superfamily type I receptor, type II receptor, or co-receptor polypeptide. Such modifications include, but are not limited to, acetylation, carboxylation, glycosylation, phosphorylation, lipidation, and acylation. As a result, the heteromultimers may comprise non-amino acid elements, such as polyethylene glycols, lipids, polysaccharide or monosaccharide, and phosphates. Effects of such non-amino acid elements on the functionality of a heteromultimer may be tested as described herein for other heteromultimer variants. When a polypeptide of the disclosure is produced in cells by cleaving a nascent form of the polypeptide, post-translational processing may also be important for correct folding and/or function of the protein. Different cells (e.g., CHO, HeLa, MDCK, 293, WI38, NIH-3T3 or HEK293) have specific cellular machinery and characteristic mechanisms for such post-translational activities and may be chosen to ensure the correct modification and processing of the TGF-beta superfamily type I receptor, type II receptor, and/or co-receptor polypeptides as well as heteromultimers comprising the same.

[0623] In certain aspects, the polypeptides disclosed herein may form heteromultimers comprising at least one TGF-beta superfamily co-receptor polypeptide associated, covalently or non-covalently, with at least one type I receptor polypeptide, type I receptor polypeptide, or another co-receptor polypeptide. Preferably, polypeptides disclosed herein form heterodimers, although higher order heteromultimers are also included such as, but not limited to, heterotrimers, heterotetramers, and further oligomeric structures (see, e.g., FIGS. 1, 2, and 6-10). In some embodiments, TGF-beta superfamily type I receptor, type II receptor, and/or co-receptor polypeptides of the present disclosure comprise at least one multimerization domain. As disclosed herein, the term “multimerization domain” refers to an amino acid or sequence of amino acids that promote covalent or non-covalent interaction between at least a first polypeptide and at least a second polypeptide. Polypeptides disclosed herein may be joined covalently or non-covalently to a multimerization domain. Preferably, a multimerization domain promotes interaction between a first polypeptide (e.g., TGF-beta superfamily co-receptor polypeptide) and a second polypeptide (e.g., TGF-beta superfamily type I or II receptor polypeptide) to promote heteromultimer formation (e.g., heterodimer formation), and optionally hinders or otherwise disfavors homomultimer formation (e.g., homodimer formation), thereby increasing the yield of desired heteromultimer (see, e.g., FIG. 2).

[0624] Many methods known in the art can be used to generate heteromultimers of the disclosure. For example, non-naturally occurring disulfide bonds may be constructed by replacing on a first polypeptide (e.g., TGF-beta superfamily co-receptor polypeptide) a naturally occurring amino acid with a free thiol-containing residue, such as cysteine, such that the free thiol interacts with another free thiol-containing residue on a second polypeptide (e.g., TGF-beta superfamily type I or type II receptor polypeptide) such that a disulfide bond is formed between the first and second polypeptides. Additional examples of interactions to promote heteromultimer formation include, but are not limited to, ionic interactions such as described in Kjaergaard et al., WO2007147901; electrostatic steering effects such as described in Kannan et al., U.S. Pat. No. 8,592,562; coiled-coil interactions such as described in Christensen et al., U.S.20120302737; leucine zippers such as described in Pack & Plueckthun, (1992) Biochemistry 31: 1579-1584; and helix-turn-helix motifs such as described in Pack et al., (1993) Bio/Technology 11: 1271-1277. Linkage of the various segments may be obtained via, e.g., covalent binding such as by chemical cross-linking, peptide linkers, disulfide bridges, etc., or affinity interactions such as by avidin-biotin or leucine zipper technology.

[0625] In certain aspects, a multimerization domain may comprise one component of an interaction pair. In some embodiments, the polypeptides disclosed herein may form protein complexes comprising a first polypeptide covalently or non-covalently associated with a second polypeptide, wherein the first polypeptide comprises the amino acid sequence of a TGF-beta superfamily co-receptor polypeptide and the amino acid sequence of a first member of an interaction pair; and the second polypeptide comprises the amino acid sequence of a TGF-beta superfamily type I receptor, type II receptor, or another co-receptor polypeptide and the amino acid sequence of a second member of an interaction pair. The interaction pair may be any two polypeptide sequences that interact to form a complex, particularly a heterodimeric complex although operative embodiments may also employ an interaction pair that can form a homodimeric complex. One member of the interaction pair may be fused to a TGF-beta superfamily type I receptor, type II receptor, or co-receptor polypeptide as described herein, including for example, a polypeptide sequence comprising an amino acid sequence that is at least 70%, 75%, 80%, 85%, 90%, 91%, 92%, 93%, 94%, 95%, 96%, 97%, 98%, 99%, or 100% identical to the sequence of any one of SEQ ID NOs: 1, 2, 3, 4, 5, 6, 9, 10, 11, 14, 15, 18, 19, 22, 23, 26, 27, 30, 31, 34, 35, 38, 39, 42, 43, 46, 47, 50, 51, 67, 68, 71, 72, 75, 76, 79, 80, 83, 84, 87, 88, 91, 92, 301, 302, 305, 306, 309, 310, 313, 501, 502, 505, 506, 509, 510, 513, 514, 517, 518, 521, 522, 525, 526, 529, 530, 533, 534, 537, 538, 541, 542, 545, 546, 549, 550, 553, 554, 557, 558, 561, 562, 565, 566, 569, 570, 573, 574, 577, 578, 581, 582, 585, 586, 589, 590, 593, 594, 595, 596, 599, 600, 603, and 604. An interaction pair may be selected to confer an improved property/activity such as increased serum half-life, or to act as an adaptor on to which another moiety is attached to provide an improved property/activity. For example, a polyethylene glycol moiety may be attached to one or both components of an interaction pair to provide an improved property/activity such as improved serum half-life.

[0626] The first and second members of the interaction pair may be an asymmetric pair, meaning that the members of the pair preferentially associate with each other rather than self-associate. Accordingly, first and second members of an asymmetric interaction pair may associate to form a heterodimeric complex (see, e.g., FIG. 2). Alternatively, the interaction pair may be unguided, meaning that the members of the pair may associate with each other or self-associate without substantial preference and thus may have the same or different amino acid sequences. Accordingly, first and second members of an unguided interaction pair may associate to form a homodimer complex or a heterodimeric complex. Optionally, the first member of the interaction pair (e.g., an asymmetric pair or an unguided interaction pair) associates covalently with the second member of the interaction pair. Optionally, the first member of the interaction pair (e.g., an asymmetric pair or an unguided interaction pair) associates non-covalently with the second member of the interaction pair.

[0627] As specific examples, the present disclosure provides fusion proteins comprising TGF-beta superfamily type I receptor, type II receptor, or co-receptor polypeptides fused to a polypeptide comprising a constant domain of an immunoglobulin, such as a CH1, CH2, or CH3 domain of an immunoglobulin or an Fc domain. Fc domains derived from human IgG1, IgG2, IgG3, and IgG4 are provided herein. Other mutations are known that decrease either CDC or ADCC activity, and collectively, any of these variants are included in the disclosure and may be used as advantageous components of a heteromultimers of the disclosure. Optionally, the IgG1 Fc domain of SEQ ID NO: 208 has one or more mutations at residues such as Asp-265, Lys-322, and Asn-434 (numbered in accordance with the corresponding full-length IgG1). In certain cases, the mutant Fc domain having one or more of these mutations (e.g., Asp-265 mutation) has reduced ability of binding to the Fcγ receptor relative to a wildtype Fc domain. In other cases, the mutant Fc domain having one or more of these mutations (e.g., Asn-434 mutation) has increased ability of binding to the MHC class I-related Fc-receptor (FcRN) relative to a wildtype Fc domain.

[0628] An example of a native amino acid sequence that may be used for the Fc portion of human IgG1 (G1Fc) is shown below (SEQ ID NO: 208). Dotted underline indicates the hinge region, and solid underline indicates positions with naturally occurring variants. In part, the disclosure provides polypeptides comprising, consisting of, or consisting essentially of an amino acid sequence with 70%, 80%, 85%, 86%, 87%, 88%, 89%, 90%, 91%, 92%, 93%, 94%, 95%, 96%, 97%, 98%, 99%, or 100% identity to SEQ ID NO: 208. Naturally occurring variants in G1Fc would include E134D and M136L according to the numbering system used in SEQ ID NO: 208 (see Uniprot P01857).

| (SEQ ID NO: 208) | |
|---|---|
| 1 | [chemical structure] |
| 51 | VKFNWYVDGV EVHNAKTKPR EEQYNSTYRV VSVLTVLHQD WLNGKEYKCK |
| 101 | VSNKALPAPI EKTISKAKGQ PREPQVYTLP PSREEMTKNQ VSLTCLVKGF |
| 151 | YPSDIAVEWE SNGQPENNYK TTPPVLDSDG SFFLYSKLTV DKSRWQQGNV |
| 201 | FSCSVMHEAL HNHYTQKSLS LSPGK |

[0629] An example of a native amino acid sequence that may be used for the Fc portion of human IgG2 (G2Fc) is shown below (SEQ ID NO: 209). Dotted underline indicates the hinge region and double underline indicates positions where there are data base conflicts in the sequence (according to UniProt P01859). In part, the disclosure provides polypeptides comprising, consisting of, or consisting essentially of an amino acid sequence with 70%, 80%, 85%, 86%, 87%, 88%, 89%, 90%, 91%, 92%, 93%, 94%, 95%, 96%, 97%, 98%, 99%, or 100% identity to SEQ ID NO: 209.

| (SEQ ID NO: 209) | |
|---|---|
| 1 | [chemical structure] |
| 51 | FNWYVDGVEV HNAKTKPREE QFNSTFRVVS VLTVVHQDWL NGKEYKCKVS |
| 101 | NKGLPAPIEK TISKTKGQPR EPQVYTLPPS REEMTKNQVS LTCLVKGFYP |
| 151 | SDIAVEWESN GQPENNYKTT PPMLDSDGSF FLYSKLTVDK SRWQQGNVFS |
| 201 | CSVMHEALHN HYTQKSLSLS PGK |

[0630] Two examples of amino acid sequences that may be used for the Fc portion of human IgG3 (G3Fc) are shown below. The hinge region in G3Fc can be up to four times as long as in other Fc chains and contains three identical 15-residue segments preceded by a similar 17-residue segment. The first G3Fc sequence shown below (SEQ ID NO: 210) contains a short hinge region consisting of a single 15-residue segment, whereas the second G3Fc sequence (SEQ ID NO: 211) contains a full-length hinge region. In each case, dotted underline indicates the hinge region, and solid underline indicates positions with naturally occurring variants according to UniProt P01859. In part, the disclosure provides polypeptides comprising, consisting of, or consisting essentially of an amino acid sequence with 70%, 80%, 85%, 86%, 87%, 88%, 89%, 90%, 91%, 92%, 93%, 94%, 95%, 96%, 97%, 98%, 99%, or 100% identity to SEQ ID NOs: 210 and 211.

| (SEQ ID NO: 210) | |
|---|---|
| 1 | [chemical structure] |
| 51 | VSHEDPEVQF KWYVDGVEVH NAKTKPREEQ YNSTFRVVSV LTVLHQDWLN |
| 101 | GKEYKCKVSN KALPAPIEKT ISKTKGQPRE PQVYTLPPSR EEMTKNQVSL |
| 151 | TCLVKGFYPS DIAVEWESSG QPENNYNTTP PMLDSDGSFF LYSKLTVDKS |
| 201 | RWQQGNIFSC SVMHEALHNR FTQKSLSLSP GK |
| (SEQ ID NO: 211) | |
| 1 | [chemical structure] |
| 51 | [chemical structure] |
| 101 | EDPEVQFKWY VDGVEVHNAK TKPREEQYNS TFRVVSVLTV LHQDWLNGKE |
| 151 | YKCKVSNKAL PAPIEKTISK TKGQPREPQV YTLPPSREEM TKNQVSLTCL |
| 201 | VKGFYPSDIA VEWESSGQPE NNYNTTPPML DSDGSFFLYS KLTVDKSRWQ |
| 251 | QGNIFSCSVM HEALHNRFTQ KSLSLSPGK |

[0631] Naturally occurring variants in G3Fc (for example, see Uniprot P01860) include E68Q, P76L, E79Q, Y81F, D97N, N100D, T124A, S169N, S169del, F221Y when converted to the numbering system used in SEQ ID NO: 210, and the present disclosure provides fusion proteins comprising G3Fc domains containing one or more of these variations. In addition, the human immunoglobulin IgG3 gene (IGHG3) shows a structural polymorphism characterized by different hinge lengths [see Uniprot P01859]. Specifically, variant WIS is lacking most of the V region and all of the CH1 region. It has an extra interchain disulfide bond at position 7 in addition to the 11 normally present in the hinge region. Variant ZUC lacks most of the V region, all of the CH1 region, and part of the hinge. Variant OMM may represent an allelic form or another gamma chain subclass. The present disclosure provides additional fusion proteins comprising G3Fc domains containing one or more of these variants.

[0632] An example of a native amino acid sequence that may be used for the Fc portion of human IgG4 (G4Fc) is shown below (SEQ ID NO: 212). Dotted underline indicates the hinge region. In part, the disclosure provides polypeptides comprising, consisting of, or consisting essentially of an amino acid sequence with 70%, 80%, 85%, 86%, 87%, 88%, 89%, 90%, 91%, 92%, 93%, 94%, 95%, 96%, 97%, 98%, 99%, or 100% identity to SEQ ID NO: 212.

| (SEQ ID NO: 212) | |
|---|---|
| 1 | [chemical structure] |
| 51 | EDPEVQFNWY VDGVEVHNAK TKPREEQFNS TYRVVSVLTV LHQDWLNGKE |
| 101 | YKCKVSNKGL PSSIEKTISK AKGQPREPQV YTLPPSQEEM TKNQVSLTCL |
| 151 | VKGFYPSDIA VEWESNGQPE NNYKTTPPVL DSDGSFFLYS RLTVDKSRWQ |
| 201 | EGNVFSCSVM HEALHNHYTQ KSLSLSLGK |

[0633] A variety of engineered mutations in the Fc domain are presented herein with respect to the G1Fc sequence (SEQ ID NO: 208), and analogous mutations in G2Fc, G3Fc, and G4Fc can be derived from their alignment with G1Fc in FIG. 5. Due to unequal hinge lengths, analogous Fc positions based on isotype alignment (FIG. 5) possess different amino acid numbers in SEQ ID NOs: 208, 209, 210, and 212. It can also be appreciated that a given amino acid position in an immunoglobulin sequence consisting of hinge, C_{H}2, and C_{H}3 regions (e.g., SEQ ID NOs: 208, 209, 210, 211, or 212) will be identified by a different number than the same position when numbering encompasses the entire IgG1 heavy-chain constant domain (consisting of the C_{H}1, hinge, C_{H}2, and C_{H}3 regions) as in the Uniprot database. For example, correspondence between selected C_{H}3 positions in a human G1Fc sequence (SEQ ID NO: 208), the human IgG1 heavy chain constant domain (Uniprot P01857), and the human IgG1 heavy chain is as follows.

Correspondence of C_{H}3 Positions in Different Numbering Systems

| G1Fc | IgG1 heavy chain | IgG1 heavy chain |
|---|---|---|
| (Numbering begins | constant domain | (EU numbering |
| at first threonine | (Numbering | scheme of |
| in hinge region) | begins at C_{H}1) | Kabat et al., 1991*) |
| Y127 | Y232 | Y349 |
| S132 | S237 | S354 |
| E134 | E239 | E356 |
| K138 | K243 | K360 |
| T144 | T249 | T366 |
| L146 | L251 | L368 |
| N162 | N267 | N384 |
| K170 | K275 | K392 |
| D177 | D282 | D399 |
| D179 | D284 | D401 |
| Y185 | Y290 | Y407 |
| K187 | K292 | K409 |
| H213 | H318 | H435 |
| K217 | K322 | K439 |

*Kabat et al. (eds) 1991; pp. 688-696 in Sequences of Proteins of Immunological Interest, 5^{th} ed., Vol. 1, NIH, Bethesda, MD.

[0634] A problem that arises in large-scale production of asymmetric immunoglobulin-based proteins from a single cell line is known as the “chain association issue”. As confronted prominently in the production of bispecific antibodies, the chain-association issue concerns the challenge of efficiently producing a desired multichain protein from among the multiple combinations that inherently result when different heavy chains and/or light chains are produced in a single cell line [see, for example, Klein et al (2012) mAbs 4:653-663]. This problem is most acute when two different heavy chains and two different light chains are produced in the same cell, in which case there are a total of 16 possible chain combinations (although some of these are identical) when only one is typically desired. Nevertheless, the same principle accounts for diminished yield of a desired multichain fusion protein that incorporates only two different (asymmetric) heavy chains.

[0635] Various methods are known in the art that increase desired pairing of Fc-containing fusion polypeptide chains in a single cell line to produce a preferred asymmetric fusion protein at acceptable yields [see, for example, Klein et al (2012) mAbs 4:653-663; and Spiess et al (2015) Molecular Immunology 67(2A): 95-106]. Methods to obtain desired pairing of Fc-containing chains include, but are not limited to, charge-based pairing (electrostatic steering), “knobs-into-holes” steric pairing, SEEDbody pairing, and leucine zipper-based pairing. See, for example, Ridgway et al (1996) Protein Eng 9:617-621; Merchant et al (1998) Nat Biotech 16:677-681; Davis et al (2010) Protein Eng Des Sel 23:195-202; Gunasekaran et al (2010); 285:19637-19646; Wranik et al (2012) J Biol Chem 287:43331-43339; U.S. Pat. No. 5,932,448; WO 1993/011162; WO 2009/089004, and WO 2011/034605. As described herein, these methods may be used to generate heterodimers comprising a TGF-beta superfamily co-receptor and a TGF-beta type I or type II receptor polypeptide or another, optionally different, TGF-beta superfamily co-receptor polypeptide. See FIGS. 6-10.

[0636] For example, one means by which interaction between specific polypeptides may be promoted is by engineering protuberance-into-cavity (knob-into-holes) complementary regions such as described in Arathoon et al., U.S. Pat. No. 7,183,076 and Carter et al., U.S. Pat. No. 5,731,168. “Protuberances” are constructed by replacing small amino acid side chains from the interface of the first polypeptide (e.g., a first interaction pair) with larger side chains (e.g., tyrosine or tryptophan). Complementary “cavities” of identical or similar size to the protuberances are optionally created on the interface of the second polypeptide (e.g., a second interaction pair) by replacing large amino acid side chains with smaller ones (e.g., alanine or threonine). Where a suitably positioned and dimensioned protuberance or cavity exists at the interface of either the first or second polypeptide, it is only necessary to engineer a corresponding cavity or protuberance, respectively, at the adjacent interface.

[0637] At neutral pH (7.0), aspartic acid and glutamic acid are negatively charged and lysine, arginine, and histidine are positively charged. These charged residues can be used to promote heterodimer formation and at the same time hinder homodimer formation. Attractive interactions take place between opposite charges and repulsive interactions occur between like charges. In part, protein complexes disclosed herein make use of the attractive interactions for promoting heteromultimer formation (e.g., heterodimer formation), and optionally repulsive interactions for hindering homodimer formation (e.g., homodimer formation) by carrying out site directed mutagenesis of charged interface residues.

[0638] For example, the IgG1 CH3 domain interface comprises four unique charge residue pairs involved in domain-domain interactions: Asp356-Lys439′, Glu357-Lys370′, Lys392-Asp399′, and Asp399-Lys409′ [residue numbering in the second chain is indicated by (′)]. It should be noted that the numbering scheme used here to designate residues in the IgG1 CH3 domain conforms to the EU numbering scheme of Kabat. Due to the 2-fold symmetry present in the CH3-CH3 domain interactions, each unique interaction will represented twice in the structure (e.g., Asp-399-Lys409′ and Lys409-Asp399′). In the wild-type sequence, K409-D399′ favors both heterodimer and homodimer formation. A single mutation switching the charge polarity (e.g., K409E; positive to negative charge) in the first chain leads to unfavorable interactions for the formation of the first chain homodimer. The unfavorable interactions arise due to the repulsive interactions occurring between the same charges (negative-negative; K409E-D399′ and D399-K409E′). A similar mutation switching the charge polarity (D399K′; negative to positive) in the second chain leads to unfavorable interactions (K409′-D399K′ and D399K-K409′) for the second chain homodimer formation. But, at the same time, these two mutations (K409E and D399K′) lead to favorable interactions (K409E-D399K′ and D399-K409′) for the heterodimer formation.

[0639] The electrostatic steering effect on heterodimer formation and homodimer discouragement can be further enhanced by mutation of additional charge residues which may or may not be paired with an oppositely charged residue in the second chain including, for example, Arg355 and Lys360. The table below lists possible charge change mutations that can be used, alone or in combination, to enhance heteromultimer formation of the heteromultimers disclosed herein.

Examples of Pair-Wise Charged Residue
Mutations to Enhance Heterodimer Formation

| | | Interacting | Corresponding |
|---|---|---|---|
| Position in | Mutation in | position in | mutation in |
| first chain | first chain | second chain | second chain |
| Lys409 | Asp or Glu | Asp399' | Lys, Arg, or His |
| Lys392 | Asp or Glu | Asp399' | Lys, Arg, or His |
| Lys439 | Asp or Glu | Asp356' | Lys, Arg, or His |
| Lys370 | Asp or Glu | Glu357' | Lys, Arg, or His |
| Asp399 | Lys, Arg, or His | Lys409' | Asp or Glu |
| Asp399 | Lys, Arg, or His | Lys392' | Asp or Glu |
| Asp356 | Lys, Arg, or His | Lys439' | Asp or Glu |
| Glu357 | Lys, Arg, or His | Lys370' | Asp or Glu |

[0640] In some embodiments, one or more residues that make up the CH3-CH3 interface in a fusion protein of the instant application are replaced with a charged amino acid such that the interaction becomes electrostatically unfavorable. For example, a positive-charged amino acid in the interface (e.g., a lysine, arginine, or histidine) is replaced with a negatively charged amino acid (e.g., aspartic acid or glutamic acid). Alternatively, or in combination with the forgoing substitution, a negative-charged amino acid in the interface is replaced with a positive-charged amino acid. In certain embodiments, the amino acid is replaced with a non-naturally occurring amino acid having the desired charge characteristic. It should be noted that mutating negatively charged residues (Asp or Glu) to His will lead to increase in side chain volume, which may cause steric issues. Furthermore, His proton donor- and acceptor-form depends on the localized environment. These issues should be taken into consideration with the design strategy. Because the interface residues are highly conserved in human and mouse IgG subclasses, electrostatic steering effects disclosed herein can be applied to human and mouse IgG1, IgG2, IgG3, and IgG4. This strategy can also be extended to modifying uncharged residues to charged residues at the CH3 domain interface.

[0641] In part, the disclosure provides desired pairing of asymmetric Fc-containing polypeptide chains using Fc sequences engineered to be complementary on the basis of charge pairing (electrostatic steering). One of a pair of Fc sequences with electrostatic complementarity can be arbitrarily fused to the TGF-beta superfamily type I receptor polypeptide, type II receptor polypeptide, or co-receptor polypeptide of the construct, with or without an optional linker, to generate a TGF-beta superfamily type I, type II, or co-receptor receptor fusion polypeptide This single chain can be coexpressed in a cell of choice along with the Fc sequence complementary to the first Fc to favor generation of the desired multichain construct (e.g., a TGF-beta superfamily heteromultimer). In this example based on electrostatic steering, SEQ ID NO: 200 [human G1Fc(E134K/D177K)] and SEQ ID NO: 201 [human G1Fc(K170D/K187D)] are examples of complementary Fc sequences in which the engineered amino acid substitutions are double underlined, and the TGF-beta superfamily type I/II receptor polypeptide or co-receptor polypeptide of the construct can be fused to either SEQ ID NO: 200 or SEQ ID NO: 201, but not both. Given the high degree of amino acid sequence identity between native hG1Fc, native hG2Fc, native hG3Fc, and native hG4Fc, it can be appreciated that amino acid substitutions at corresponding positions in hG2Fc, hG3Fc, or hG4Fc (see FIG. 5) will generate complementary Fc pairs which may be used instead of the complementary hG1Fc pair below (SEQ ID NOs: 200 and 201).

| (SEQ ID NO: 200) | |
|---|---|
| 1 | THTCPPCPAP ELLGGPSVFL FPPKPKDTLM ISRTPEVTCV VVDVSHEDPE |
| 51 | VKFNWYVDGV EVHNAKTKPR EEQYNSTYRV VSVLTVLHQD WLNGKEYKCK |
| 101 | VSNKALPAPI EKTISKAKGQ PREPQVYTLP PSRKEMTKNQ VSLTCLVKGF |
| 151 | YPSDIAVEWE SNGQPENNYK TTPPVLKSDG SFFLYSKLTV DKSRWQQGNV |
| 201 | FSCSVMHEAL HNHYTQKSLS LSPGK |
| (SEQ ID NO: 201) | |
| 1 | THTCPPCPAP ELLGGPSVFL FPPKPKDTLM ISRTPEVTCV VVDVSHEDPE |
| 51 | VKFNWYVDGV EVHNAKTKPR EEQYNSTYRV VSVLTVLHQD WLNGKEYKCK |
| 101 | VSNKALPAPI EKTISKAKGQ PREPQVYTLP PSREEMTKNQ VSLTCLVKGF |
| 151 | YPSDIAVEWE SNGQPENNYD TTPPVLDSDG SFFLYSDLTV DKSRWQQGNV |
| 201 | FSCSVMHEAL HNHYTQKSLS LSPGK |

[0642] In part, the disclosure provides desired pairing of asymmetric Fc-containing polypeptide chains using Fc sequences engineered for steric complementarity. In part, the disclosure provides knobs-into-holes pairing as an example of steric complementarity. One of a pair of Fc sequences with steric complementarity can be arbitrarily fused to the TGF-beta superfamily type I receptor polypeptide, type II receptor polypeptide, or co-receptor polypeptide of the construct, with or without an optional linker, to generate a TGF-beta superfamily type I, type II, or co-receptor fusion polypeptide. This single chain can be coexpressed in a cell of choice along with the Fc sequence complementary to the first Fc to favor generation of the desired multichain construct. In this example based on knobs-into-holes pairing, SEQ ID NO: 202 [human G1Fc(T144Y)] and SEQ ID NO: 203 [human G1Fc(Y185T)] are examples of complementary Fc sequences in which the engineered amino acid substitutions are double underlined, and the TGF-beta superfamily type I receptor polypeptide, type II receptor polypeptide, or co-receptor polypeptide of the construct can be fused to either SEQ ID NO: 202 or SEQ ID NO: 203, but not both. Given the high degree of amino acid sequence identity between native hG1Fc, native hG2Fc, native hG3Fc, and native hG4Fc, it can be appreciated that amino acid substitutions at corresponding positions in hG2Fc, hG3Fc, or hG4Fc (see FIG. 5) will generate complementary Fc pairs which may be used instead of the complementary hG1Fc pair below (SEQ ID NOs: 202 and 203).

| (SEQ ID NO: 202) | |
|---|---|
| 1 | THTCPPCPAP ELLGGPSVFL FPPKPKDTLM ISRTPEVTCV VVDVSHEDPE |
| 51 | VKFNWYVDGV EVHNAKTKPR EEQYNSTYRV VSVLTVLHQD WLNGKEYKCK |
| 101 | VSNKALPAPI EKTISKAKGQ PREPQVYTLP PSREEMTKNQ VSLYCLVKGF |
| 151 | YPSDIAVEWE SNGQPENNYK TTPPVLDSDG SFFLYSKLTV DKSRWQQGNV |
| 201 | FSCSVMHEAL HNHYTQKSLS LSPGK |
| (SEQ ID NO: 203) | |
| 1 | THTCPPCPAP ELLGGPSVFL FPPKPKDTLM ISRTPEVTCV VVDVSHEDPE |
| 51 | VKFNWYVDGV EVHNAKTKPR EEQYNSTYRV VSVLTVLHQD WLNGKEYKCK |
| 101 | VSNKALPAPI EKTISKAKGQ PREPQVYTLP PSREEMTKNQ VSLTCLVKGF |
| 151 | YPSDIAVEWE SNGQPENNYK TTPPVLDSDG SFFLTSKLTV DKSRWQQGNV |
| 201 | FSCSVMHEAL HNHYTQKSLS LSPGK |

[0643] An example of Fc complementarity based on knobs-into-holes pairing combined with an engineered disulfide bond is disclosed in SEQ ID NO: 204 [hG1Fc(S132C/T144W)] and SEQ ID NO: 205 [hG1Fc(Y127C/T144S/L146A/Y185V)]. The engineered amino acid substitutions in these sequences are double underlined, and the TGF-beta superfamily type I/II receptor polypeptide or co-receptor of the construct can be fused to either SEQ ID NO: 204 or SEQ ID NO: 205, but not both. Given the high degree of amino acid sequence identity between native hG1Fc, native hG2Fc, native hG3Fc, and native hG4Fc, it can be appreciated that amino acid substitutions at corresponding positions in hG2Fc, hG3Fc, or hG4Fc (see FIG. 5) will generate complementary Fc pairs which may be used instead of the complementary hG1Fc pair below (SEQ ID NOs: 204 and 205).

| (SEQ ID NO: 204) | |
|---|---|
| 1 | THTCPPCPAP ELLGGPSVFL FPPKPKDTLM ISRTPEVTCV VVDVSHEDPE |
| 51 | VKFNWYVDGV EVHNAKTKPR EEQYNSTYRV VSVLTVLHQD WLNGKEYKCK |
| 101 | VSNKALPAPI EKTISKAKGQ PREPQVYTLP PCREEMTKNQ VSLWCLVKGF |
| 151 | YPSDIAVEWE SNGQPENNYK TTPPVLDSDG SFFLYSKLTV DKSRWQQGNV |
| 201 | FSCSVMHEAL HNHYTQKSLS LSPGK |
| (SEQ ID NO: 205) | |
| 1 | THTCPPCPAP ELLGGPSVFL FPPKPKDTLM ISRTPEVTCV VVDVSHEDPE |
| 51 | VKFNWYVDGV EVHNAKTKPR EEQYNSTYRV VSVLTVLHQD WLNGKEYKCK |
| 101 | VSNKALPAPI EKTISKAKGQ PREPQVCTLP PSREEMTKNQ VSLSCAVKGF |
| 151 | YPSDIAVEWE SNGQPENNYK TTPPVLDSDG SFFLVSKLTV DKSRWQQGNV |
| 201 | FSCSVMHEAL HNHYTQKSLS LSPGK |

[0644] In part, the disclosure provides desired pairing of asymmetric Fc-containing polypeptide chains using Fc sequences engineered to generate interdigitating β-strand segments of human IgG and IgA C_{H}3 domains. Such methods include the use of strand-exchange engineered domain (SEED) C_{H}3 heterodimers allowing the formation of SEEDbody fusion proteins [see, for example, Davis et al (2010) Protein Eng Design Sel 23:195-202]. One of a pair of Fc sequences with SEEDbody complementarity can be arbitrarily fused to the TGF-beta superfamily type I receptor polypeptide, type II receptor polypeptide or co-receptor polypeptide of the construct, with or without an optional linker, to generate a TGF-beta superfamily fusion polypeptide. This single chain can be coexpressed in a cell of choice along with the Fc sequence complementary to the first Fc to favor generation of the desired multichain construct. In this example based on SEEDbody (Sb) pairing, SEQ ID NO: 206 [hG1Fc(Sb_{AG})] and SEQ ID NO: 207 [hG1Fc(Sb_{GA})] are examples of complementary IgG Fc sequences in which the engineered amino acid substitutions from IgA Fc are double underlined, and the TGF-beta superfamily type I or type II polypeptide of the construct can be fused to either SEQ ID NO: 206 or SEQ ID NO: 207, but not both. Given the high degree of amino acid sequence identity between native hG1Fc, native hG2Fc, native hG3Fc, and native hG4Fc, it can be appreciated that amino acid substitutions at corresponding positions in hG1Fc, hG2Fc, hG3Fc, or hG4Fc (see FIG. 5) will generate an Fc monomer which may be used in the complementary IgG-IgA pair below (SEQ ID NOs: 206 and 207).

| (SEQ ID NO: 206) | |
|---|---|
| 1 | THTCPPCPAP ELLGGPSVFL FPPKPKDTLM ISRTPEVTCV VVDVSHEDPE |
| 51 | VKFNWYVDGV EVHNAKTKPR EEQYNSTYRV VSVLTVLHQD WLNGKEYKCK |
| 101 | VSNKALPAPI EKTISKAKGQ PFRPEVHLLP PSREEMTKNQ VSLTCLARGF |
| 151 | YPKDIAVEWE SNGQPENNYK TTPSRQEPSO GTTTFAVTSK LTVDKSRWQQ |
| 201 | GNVFSCSVMH EALHNHYTQK TISLSPGK |
| (SEQ ID NO: 207) | |
| 1 | THTCPPCPAP ELLGGPSVFL FPPKPKDTLM ISRTPEVTCV VVDVSHEDPE |
| 51 | VKFNWYVDGV EVHNAKTKPR EEQYNSTYRV VSVLTVLHQD WLNGKEYKCK |
| 101 | VSNKALPAPI EKTISKAKGQ PREPQVYTLP PPSEELALNE LVTLTCLVKG |
| 151 | FYPSDIAVEW ESNGQELPRE KYLTWAPVLD SDGSFFLYSI LRVAAEDWKK |
| 201 | GDTFSCSVMH EALHNHYTQK SLDRSPGK |

[0645] In part, the disclosure provides desired pairing of asymmetric Fc-containing polypeptide chains with a cleavable leucine zipper domain attached at the C-terminus of the Fc C_{H}3 domains. Attachment of a leucine zipper is sufficient to cause preferential assembly of heterodimeric antibody heavy chains. See, e.g., Wranik et al (2012) J Biol Chem 287:43331-43339. As disclosed herein, one of a pair of Fc sequences attached to a leucine zipper-forming strand can be arbitrarily fused to the TGF-beta superfamily type I receptor polypeptide, type II receptor polypeptide, or co-receptor polypeptide of the construct, with or without an optional linker, to generate a TGF-beta superfamily fusion polypeptide. This single chain can be coexpressed in a cell of choice along with the Fc sequence attached to a complementary leucine zipper-forming strand to favor generation of the desired multichain construct. Proteolytic digestion of the construct with the bacterial endoproteinase Lys-C post purification can release the leucine zipper domain, resulting in an Fc construct whose structure is identical to that of native Fc. In this example based on leucine zipper pairing, SEQ ID NO: 213 [hG1Fc-Ap1 (acidic)] and SEQ ID NO: 214 [hG1Fc-Bp1 (basic)] are examples of complementary IgG Fc sequences in which the engineered complimentary leucine zipper sequences are underlined, and the TGF-beta superfamily type I/II polypeptide or co-receptor polypeptide of the construct can be fused to either SEQ ID NO: 213 or SEQ ID NO: 214, but not both. Given the high degree of amino acid sequence identity between native hG1Fc, native hG2Fc, native hG3Fc, and native hG4Fc, it can be appreciated that leucine zipper-forming sequences attached, with or without an optional linker, to hG1Fc, hG2Fc, hG3Fc, or hG4Fc (see FIG. 5) will generate an Fc monomer which may be used in the complementary leucine zipper-forming pair below (SEQ ID NOs: 213 and 214).

| (SEQ ID NO: 213) | |
|---|---|
| 1 | THTCPPCPAP ELLGGPSVFL FPPKPKDTLM ISRTPEVTCV VVDVSHEDPE |
| 51 | VKFNWYVDGV EVHNAKTKPR EEQYNSTYRV VSVLTVLHQD WLNGKEYKCK |
| 101 | VSNKALPAPI EKTISKAKGQ PREPQVYTLP PSREEMTKNQ VSLTCLVKGF |
| 151 | YPSDIAVEWE SNGQPENNYK TTPPVLDSDG SFFLYSKLTV DKSRWQQGNV |
| 201 | FSCSVMHEAL HNHYTQKSLS LSPGKGGSAQ LEKELQALEK ENAQLEWELQ |
| 251 | ALEKELAQGA T |
| (SEQ ID NO: 214) | |
| 1 | THTCPPCPAP ELLGGPSVFL FPPKPKDTLM ISRTPEVTCV VVDVSHEDPE |
| 51 | VKFNWYVDGV EVHNAKTKPR EEQYNSTYRV VSVLTVLHQD WLNGKEYKCK |
| 101 | VSNKALPAPI EKTISKAKGQ PREPQVYTLP PSREEMTKNQ VSLTCLVKGF |
| 151 | YPSDIAVEWE SNGQPENNYK TTPPVLDSDG SFFLYSKLTV DKSRWQQGNV |
| 201 | FSCSVMHEAL HNHYTQKSLS LSPGKGGSAQ LKKKLQALKK KNAQLKWKLQ |
| 251 | ALKKKLAQGA T |

[0646] In part, the disclosure provides desired pairing of asymmetric Fc-containing polypeptide chains by methods described above in combination with additional mutations in the Fc domain which facilitate purification of the desired heteromeric species. An example is complementarity of Fc domains based on knobs-into-holes pairing combined with an engineered disulfide bond, as disclosed in SEQ ID NOs: 204-205, plus additional substitution of two negatively charged amino acids (aspartic acid or glutamic acid) in one Fc-containing polypeptide chain and two positively charged amino acids (e.g., arginine) in the complementary Fc-containing polypeptide chain (SEQ ID NOs: 215-216). These four amino acid substitutions facilitate selective purification of the desired heteromeric fusion protein from a heterogeneous polypeptide mixture based on differences in isoelectric point or net molecular charge. The engineered amino acid substitutions in these sequences are double underlined below, and the TGFβ superfamily type I receptor polypeptide, type II receptor polypeptide, or co-receptor polypeptide of the construct can be fused to either SEQ ID NO: 215 or SEQ ID NO: 216, but not both. Given the high degree of amino acid sequence identity between native hG1Fc, native hG2Fc, native hG3Fc, and native hG4Fc, it can be appreciated that amino acid substitutions at corresponding positions in hG2Fc, hG3Fc, or hG4Fc (see FIG. 5) will generate complementary Fc pairs which may be used instead of the complementary hG1Fc pair below (SEQ ID NOs: 215-216).

| (SEQ ID NO: 215) | |
|---|---|
| 1 | THTCPPCPAP ELLGGPSVFL FPPKPKDTLM ISRTPEVTCV VVDVSHEDPE |
| 51 | VKFNWYVDGV EVHNAKTKPR EEQYNSTYRV VSVLTVLHQD WLNGKEYKCK |
| 101 | VSNKALPAPI EKTISKAKGQ PREPQVYTLP PCREEMTENQ VSLWCLVKGF |
| 151 | YPSDIAVEWE SNGQPENNYK TTPPVLDSDG SFFLYSKLTV DKSRWQQGNV |
| 201 | FSCSVMHEAL HNHYTQDSLS LSPGK |
| (SEQ ID NO: 216) | |
| 1 | THTCPPCPAP ELLGGPSVFL FPPKPKDTLM ISRTPEVTCV VVDVSHEDPE |
| 51 | VKFNWYVDGV EVHNAKTKPR EEQYNSTYRV VSVLTVLHQD WLNGKEYKCK |
| 101 | VSNKALPAPI EKTISKAKGQ PREPQVCTLP PSREEMTKNQ VSLSCAVKGF |
| 151 | YPSDIAVEWE SRGQPENNYK TTPPVLDSRG SFFLVSKLTV DKSRWQQGNV |
| 201 | FSCSVMHEAL HNHYTQKSLS LSPGK |

[0647] Another example involves complementarity of Fc domains based on knobs-into-holes pairing combined with an engineered disulfide bond, as disclosed in SEQ ID NOs: 204-205, plus a histidine-to-arginine substitution at position 213 in one Fc-containing polypeptide chain (SEQ ID NO: 217). This substitution (denoted H435R in the numbering system of Kabat et al.) facilitates separation of desired heteromer from undesirable homodimer based on differences in affinity for protein A. The engineered amino acid substitution is indicated by double underline, and the TGFβ superfamily type I receptor polypeptide, type II receptor polypeptide, or co-receptor polypeptide of the construct can be fused to either SEQ ID NO: 217 or SEQ ID NO: 205, but not both. Given the high degree of amino acid sequence identity between native hG1Fc, native hG2Fc, native hG3Fc, and native hG4Fc, it can be appreciated that amino acid substitutions at corresponding positions in hG2Fc, hG3Fc, or hG4Fc (see FIG. 5) will generate complementary Fc pairs which may be used instead of the complementary hG1Fc pair of SEQ ID NO: 217 (below) and SEQ ID NO: 205.

| (SEQ ID NO: 217) | |
|---|---|
| 1 | THTCPPCPAP ELLGGPSVFL FPPKPKDTLM ISRTPEVTCV VVDVSHEDPE |
| 51 | VKFNWYVDGV EVHNAKTKPR EEQYNSTYRV VSVLTVLHQD WLNGKEYKCK |
| 101 | VSNKALPAPI EKTISKAKGQ PREPQVYTLP PCREEMTKNQ VSLWCLVKGF |
| 151 | YPSDIAVEWE SNGQPENNYK TTPPVLDSDG SFFLYSKLTV DKSRWQQGNV |
| 201 | FSCSVMHEAL HNRYTQKSLS LSPGK |

[0648] A variety of engineered mutations in the Fc domain are presented above with respect to the G1Fc sequence (SEQ ID NO: 208). Analogous mutations in G2Fc, G3Fc, and G4Fc can be derived from their alignment with G1Fc in FIG. 5. Due to unequal hinge lengths, analogous Fc positions based on isotype alignment (FIG. 5) possess different amino acid numbers in SEQ ID NOs: 208, 209, 210, and 212 as summarized in the following table.

Correspondence between
C_{H}3 Positions for Human Fc Isotypes*

| IgG1 | IgG4 | IgG2 | IgG3 |
|---|---|---|---|
| SEQ ID | SEQ ID | SEQ ID | SEQ ID |
| NO: 208 | NO: 212 | NO: 209 | NO: 210 |
| Numbering | Numbering | Numbering | Numbering |
| begins | begins | begins | begins |
| at THT . . . | at ESK . . . | at VEC . . . | at EPK . . . |
| Y127 | Y131 | Y125 | Y134 |
| S132 | S136 | S130 | S139 |
| E134 | E138 | E132 | E141 |
| K138 | K142 | K136 | K145 |
| T144 | T148 | T142 | T151 |
| L146 | L150 | L144 | L153 |
| N162 | N166 | N160 | S169 |
| K170 | K174 | K168 | N177 |
| D177 | D181 | D175 | D184 |
| D179 | D183 | D177 | D186 |
| Y185 | Y189 | Y183 | Y192 |
| K187 | R191 | K185 | K194 |
| H213 | H217 | H211 | R220 |
| K217 | K221 | K215 | K224 |

*Numbering based on multiple sequence alignment shown in FIG. 5

[0649] As described above, various methods are known in the art that increase desired pairing of Fc-containing fusion polypeptide chains in a single cell line to produce a preferred asymmetric fusion protein at acceptable yields [Klein et al (2012) mAbs 4:653-663; and Spiess et al (2015) Molecular Immunology 67(2A): 95-106]. In addition, heteromultimers as described herein may be generated using a combination of heavy and light chain fusion proteins comprising either an TGF-beta superfamily type I receptor polypeptide, type II receptor polypeptide, or co-receptor polypeptide. For example, in some embodiments, a TGF-beta superfamily type I or type II receptor polypeptide may be fused, with or without a linker domain, to an immunoglobulin heavy chain (IgG1, IgG2, IgG3, IgG4, IgM, IgA1, or IgA2) that comprises at least a portion of the C_{H}1 domain. Similarly, a TGF-beta superfamily co-receptor polypeptide may be fused, with or without a linker domain, to an immunoglobulin light chain (kappa or lambda) that comprises at least a portion of the light chain constant domain (C_{L}). In alternative embodiments, a TGF-beta superfamily co-receptor polypeptide may be fused, with or without a linker domain, to an immunoglobulin heavy chain (IgG1, IgG2, IgG3, IgG4, IgM, IgA1, or IgA2) that comprises at least a portion of the C_{H}1 domain, and a TGF-beta superfamily type I receptor or type II receptor polypeptide may be fused, with or without a linker domain, to an immunoglobulin light chain (kappa or lambda) that comprises at least a portion of the light chain constant domain (C_{L}). This design takes advantage of the natural ability of the heavy chains to heterodimerize with light chains. In particular, heterodimerization of a heavy and light chain occurs between the C_{H}1 with the C_{L}, which is generally stabilized by covalent linking of the two domains via a disulfide bridge. Constructs employing the full-length heavy chain, or at least a portion of the heavy chain comprising the hinge region, could give rise to antibody-like molecules comprising two “light chains” and two “heavy chains”. See FIG. 7. A potential advantage of this design is that it may more closely mimic the naturally occurring TGF-beta superfamily type I/II receptor polypeptide-ligand-TGF-beta superfamily co-receptor polypeptide complex and may display higher affinity for the ligand than comparable single homodimers. In some embodiments, this design may be modified by incorporating various heavy chain truncations including, for example, truncations that comprise the C_{H}1 domain and some or all of the hinge domain (giving rise to F(ab′)₂-like molecules) as well as truncations that only comprise the C_{H}1 domain or a fragment thereof (giving rise to Fab-like molecules). See FIG. 7G. Various methods for designing such heteromultimer constructs are described in US 2009/0010879, Klein et al [(2012) mAbs 4:653-663], and Spiess et al [(2015) Molecular Immunology 67(2A): 95-106] the contents of which are incorporated in their entirety herein.

[0650] In some embodiments, it is desirable to generate antibody-like heterodimers comprising at least one branch of the complex comprising an TGF-beta superfamily type I or type II receptor polypeptide-C_{L}:TGF-beta superfamily co-receptor polypeptide-C_{H}1 heterodimer pair and at least a second branch comprising an TGF-beta superfamily co-receptor polypeptide-C_{L}:TGF-beta superfamily type I or type II receptor polypeptide r-C_{H}1 heterodimer pair. See, e.g., FIG. 7B. Such heterodimer complexes can be generated, for example, using combinations of heavy chain and light chain asymmetrical pairing technologies [Spiess et al (2015) Molecular Immunology 67(2A): 95-106]. For example, in CrossMab technology, [Schaefer et al (2011). Proc. Natl. Acad. Sci. U.S.A. 108: 11187-11192] light chain mispairing is overcome using domain crossovers and heavy chains heterodimerized using knobs-into-holes [Merchant et al (1998) Nat. Biotechnol. 16: 677-681]. For the domain crossovers either the variable domains or the constant domains are swapped between light and heavy chains to create two asymmetric Fab arms that drive cognate light chain pairing while preserving the structural and functional integrity of the variable domain [Fenn et al (2013) PLoS ONE 8: e61953]. An alternative approach for overcoming light chain mispairing is designing heavy and light chains with orthogonal Fab inter-faces [Lewis (2014) Nat. Biotechnol. 32: 191-198]. This has been accomplished by computational modeling [Das et al (2008) Annu. Rev. Biochem. 77: 363-382] in combination with X-ray crystallography to identify mutations at the V_{H}/V_{L} and C_{H}1/C_{L} interfaces. For the heterodimers generated using this methodology, it may be necessary to engineer mutations into both V_{H}/V_{L} and C_{H}1/C_{L} interfaces to minimize heavy/light chain mispairing. The designed orthogonal Fab interface may be used in conjunction with a heavy chain heterodimerization strategy to facilitate efficient IgG production in a single host cell. Electrostatic steering may also be used to generate orthogonal Fab interfaces to facilitate the construction of such heterodimers. Peptide linkers may be used to ensure cognate pairing of light and heavy chains in a format known as “LUZ-Y” [Wranik et al (2012) J. Biol. Chem. 287: 43331-43339], wherein heavy chain heterodimerization is accomplished using leucine zippers which may be subsequently removed by proteolysis in vitro.

[0651] Alternatively, heteromultimers may comprise one or more single-chain ligand traps as described herein, optionally which may be covalently or non-covalently associated with one or more TGF-beta superfamily type I receptor polypeptides, type II receptor polypeptides, or co-receptor polypeptides as well as additional TGF-beta superfamily type I/II receptor polypeptide:TGF-beta superfamily co-receptor polypeptide single chain ligand traps [US 2011/0236309 and US2009/0010879]. See FIGS. 9 and 10. As described herein, single-chain ligand traps do not require fusion to any multimerization domain such as coiled-coil Fc domains to be multivalent. In general, single-chain ligand traps of the present disclosure comprise at least one TGF-beta superfamily type I receptor polypeptide or type II receptor polypeptide domain and one TGF-beta superfamily co-receptor polypeptide domain. The TGF-beta superfamily type I or type II receptor polypeptide and TGF-beta superfamily co-receptor polypeptide domains, generally referred to herein as binding domains (BD), optionally may be joined by a linker region.

[0652] For example, in one aspect, the present disclosure provides heteromultimers comprising a polypeptide having the following structure:

[0653] (<BD1>-linker1)ₖ-[<BD2>-linker2-{<BD3>-linker3}_{f}]ₙ-(<BD4>)ₘ-(linker4-BD5>_{d})ₕ

[0654] where: n and h are independently greater than or equal to one; d, f, m, and k are independently equal to or greater than zero; BD1, BD2, BD3, BD4, and BD5 are independently TGF-beta superfamily type I/II receptor polypeptide or TGF-beta superfamily co-receptor polypeptide domains, wherein at least one of BD1, BD2, BD3, and BD4 is an TGF-beta superfamily type I/II receptor polypeptide domain, and wherein at least one of BD1, BD2, BD3, and BD4 is an TGF-beta superfamily co-receptor polypeptide domain, and linker1, linker2, linker3, and linker 4 are independently greater than or equal to zero. In some embodiment, TGF-beta superfamily type I/II receptor polypeptide:TGF-beta superfamily co-receptor polypeptide single-chain traps comprise at least two different TGF-beta superfamily type I or type II receptor polypeptide. In some embodiments, TGF-beta superfamily type I/II receptor polypeptide:TGF-beta superfamily co-receptor polypeptide single-chain traps comprise at least two different TGF-beta superfamily co-receptor polypeptide polypeptides. In some embodiment, TGF-beta superfamily type I/II receptor polypeptide:TGF-beta superfamily co-receptor polypeptide single-chain traps comprise at least two different linkers. Depending on the values of selected for d, f, h, k, m, and n, the heteromultimer structure may comprise a large number of repeating units in various combinations or may be a relatively simple structure.

[0655] In another aspect, the present disclosure provides heteromultimers comprising a polypeptide having the following structure:

[0656] <BD1>-linker1-<BD2>

[0657] In yet another aspect, the present disclosure provides heteromultimers comprising a polypeptide having the following structure:

[0658] <BD1>-(linker2-<BD2>)ₙ

[0659] where n is greater than or equal one.

[0660] Another aspect of the invention provides heteromultimers comprising a polypeptide having the following structure:

[0661] (<BD1>-linker1-<BD1>)_{f}-linker2-(<BD2>-linker3-<BD3>)_{g}

[0662] wherein f and g are greater than or equal to one.

[0663] In an embodiment where BD2 and BD3 are the same, and f and g are the same number, this can result in a substantially mirror symmetric structure around linker 2, subject to differences in the linkers. In instances where BD2 is different from BD3 and/or where f and g are different numbers, different structures will be produced. It is within the capacity of one of ordinary skill in the art to select suitable binding domains, linkers, and repeat frequencies in light of the disclosure herein and knowledge in the art. Specific, non-limiting examples of such single-chain ligand traps in accordance with the present disclosure are represented schematically in FIG. 9.

[0664] The linkers (1, 2, 3, and 4) may be the same or different. The linker region provides a segment that is distinct from the structured ligand-binding domains of TGF-beta superfamily type I/II receptor polypeptide and TGF-beta superfamily co-receptor polypeptide and thus can be used for conjugation to accessory molecules (e.g., molecules useful in increasing stability such as PEGylation moieties) without having to chemically modify the binding domains. The linker may include an unstructured amino acid sequence that may be either the same as or derived from conservative modifications to the sequence of a natural unstructured region in the extracellular portion of the receptor for the ligand of interest or another receptor in the TGF-β superfamily. In other instances, such linkers may be entirely artificial in composition and origin but will contain amino acids selected to provide an unstructured flexible linker with a low likelihood of encountering electrostatic or steric hindrance complications when brought into close proximity to the ligand of interest. Linker length will be considered acceptable when it permits binding domains located on each of the N- and C-termini of the linker to bind their natural binding sites on their natural ligand such that, with both binding domains so bound, the ligand is bound with a higher affinity than it would be bound by binding of only one of the binding domains. In some instances, the number of amino acid residues in the linker of either natural or artificial origin is selected to be equal to or greater than the minimum required distance for simultaneous (bridged) binding to two binding sites on the TGF-beta superfamily type I/II receptor polypeptide and/or TGF-beta superfamily co-receptor polypeptide ligand. For example, and without wishing to be limiting in any manner, the linker length may be between about 1-10 amino acids, 10-20 amino acids, 18-80 amino acids, 25-60 amino acids, 35-45 amino acids, or any other suitable length.

[0665] Linkers may be designed to facilitate purification of the polypeptide. The exact purification scheme chosen will determine what modifications are needed, for example and without wishing to be limiting, additions of purification “tags” such as His tags is contemplated; in other examples, the linker may include regions to facilitate the addition of cargo or accessory molecules. When such additions affect the unstructured nature of the linker or introduce potential electrostatic or steric concerns, appropriate increases to the linker length will be made to ensure that the two binding domains are able to bind their respective sites on the ligand. In light of the methods and teachings herein, such determinations could be made routinely by one skilled in the art.

[0666] In addition, the present design permits linkage of other cargo molecules (for example imaging agents like fluorescent molecules), toxins, etc. For example, and without wishing to be limiting in any manner, single-chain polypeptides can be modified to add one or more cargo and/or accessory molecules (referred to collectively herein by R1, R2, R3, R4, etc.):

[chemical structure]

[0667] Without limiting the generality of R substituents available, R1, R2, R3, R4, R5, R6, R7, R8, R9, may or may not be present; when present, they may be the same or different, and may independently be one or more of: a fusion protein for targeting, for example, but not limited to such as an antibody fragment (e.g. single chain Fv) and/or a single domain antibody (sdAb); a radiotherapy and/or imaging agent, for example, but not limited to a radionucleotide (e.g. ¹²³I, ¹¹¹In, ¹⁸F, ⁶⁴C, ⁶⁸Y, ¹²⁴I, ¹³¹I, ⁹⁰Y, ¹⁷⁷Lu, ⁵⁷Cu, ²¹³Bi, ²¹¹At), a fluorescent dye (e.g. Alexa Fluor, Cy dye) and/or a fluorescent protein tag (e.g. GFP, DsRed); a cytotoxic agent for chemotherapy, for example, but not limited to doxorubicin, calicheamicin, a maytansinoid derivatives (e.g. DM1, DM4), a toxin (eg. truncated Pseudomonas endotoxin A, diphtheria toxin); a nanoparticle-based carrier, for example, but not limited to polyethylene glycol (PEG), a polymer-conjugated to drug, nanocarrier or imaging agent (e.g. of a polymer N-(2-hydroxylpropyl) methacrylamide (HPMA), glutamic acid, PEG, dextran); a drug (for example, but not limited to doxorubicin, camptothecin, paclitaxel, palatinate); a nanocarrier, for example, but not limited to a nanoshell or liposome; an imaging agent, for example, but not limited to Supermagnetic Iron Oxide (SPIO); a dendrimer; and/or a solid support for use in ligand purification, concentration or sequestration (e.g. nanoparticles, inert resins, suitable silica supports).

[0668] In general, it will not be preferable to have cargo or accessory molecules in all possible positions, as this may cause steric or electrostatic complications. However, the effects of adding a cargo or accessory molecule to any given position or positions on the structure can be determined routinely in light of the disclosure herein by modeling the linker between the binding domains and carrying out molecular dynamics simulations to substantially minimize molecular mechanics energy and reduce steric and electrostatic incompatibility between the linker and the TGF-beta superfamily type I/II receptor polypeptide and TGF-beta superfamily co-receptor polypeptide as taught herein.

[0669] It may be preferable to add the cargo or accessory molecule to the linker portion of the agent, rather to the binding domain, to reduce the likelihood of interference in binding function. However, addition to the binding domain is possible and could be desirable in some instances and the effect of such an addition can be determined routinely in advance by modeling the binding agent and the linker with the proposed addition as described herein.

[0670] Conjugation methodologies may be performed using commercial kits that enable conjugation via common reactive groups such as primary amines, succinimidyl (NHS) esters and sulfhydral-reactive groups. Some non-limiting examples are: Alexa Fluor 488 protein labeling kit (Molecular Probes, Invitrogen detection technologies) and PEGylation kits (Pierce Biotechnology Inc.).

[0671] In certain aspects, TGF-beta superfamily type I or type II receptor polypeptide:TGF-beta superfamily co-receptor polypeptide single-chain traps may be covalently or non-covalently associated with one or more TGF-beta superfamily type I/II receptor polypeptides or TGF-beta superfamily co-receptor polypeptide as well as additional TGF-beta superfamily type I/II receptor polypeptide:TGF-beta superfamily co-receptor polypeptide single chain ligand traps to form higher order heteromultimers, which may be used in accordance with the methods described herein. See, e.g., FIG. 10. For example, an TGF-beta superfamily type I or type II receptor polypeptide:TGF-beta superfamily co-receptor polypeptide single chain ligand trap may further comprise a multimerization domain as described herein. In some embodiments, TGF-beta superfamily type I or type II receptor polypeptide:TGF-beta superfamily co-receptor polypeptide single chain ligand traps comprise a constant domain of an Ig immunoglobulin. Such immunoglobulins constant domains may be selected to promote symmetrical or asymmetrical complexes comprising at least one single-chain TGF-beta superfamily type I or type II receptor polypeptide:TGF-beta superfamily co-receptor polypeptide trap.

[0672] In certain aspects, a TGF-beta superfamily type I or type II receptor polypeptide:TGF-beta superfamily co-receptor polypeptide single-chain trap, or combinations of such traps, may be used as TGF-beta superfamily antagonists to treat or prevent an TGF-beta superfamily disorder or disease as described herein (e.g., a bone-related disorder and anemia).

[0673] It is understood that different elements of the fusion proteins (e.g., immunoglobulin Fc fusion proteins) may be arranged in any manner that is consistent with desired functionality. For example, a TGF-beta superfamily type I receptor polypeptide, type II receptor polypeptide, or co-receptor polypeptide domain may be placed C-terminal to a heterologous domain, or alternatively, a heterologous domain may be placed C-terminal to a TGF-beta superfamily type I receptor polypeptide, type II receptor polypeptide, and/or co-receptor polypeptide domain. The TGF-beta superfamily type I receptor polypeptide, type II receptor polypeptide, or co-receptor domain and the heterologous domain need not be adjacent in a fusion protein, and additional domains or amino acid sequences may be included C- or N-terminal to either domain or between the domains.

[0674] For example, a TGF-beta superfamily type I receptor, type II receptor, or co-receptor fusion protein may comprise an amino acid sequence as set forth in the formula A-B-C. The B portion corresponds to a TGF-beta superfamily type I receptor polypeptide, type II receptor polypeptide, or co-receptor polypeptide domain. The A and C portions may be independently zero, one, or more than one amino acid, and both the A and C portions when present are heterologous to B. The A and/or C portions may be attached to the B portion via a linker sequence. A linker may be rich in glycine (e.g., 2-10, 2-5, 2-4, 2-3 glycine residues) or glycine and proline residues and may, for example, contain a single sequence of threonine/serine and glycines or repeating sequences of threonine/serine and/or glycines, e.g., GGG (SEQ ID NO: 58), GGGG (SEQ ID NO: 59), TGGGG (SEQ ID NO: 60), SGGGG (SEQ ID NO: 61), TGGG (SEQ ID NO: 62), or SGGG (SEQ ID NO: 63) singlets, or repeats. In certain embodiments, a TGF-beta superfamily type I receptor, type II receptor, or co-receptor fusion protein comprises an amino acid sequence as set forth in the formula A-B-C, wherein A is a leader (signal) sequence, B consists of a TGF-beta superfamily type I receptor polypeptide, type II receptor polypeptide, or co-receptor polypeptide domain, and C is a polypeptide portion that enhances one or more of in vivo stability, in vivo half-life, uptake/administration, tissue localization or distribution, formation of protein complexes, and/or purification. In certain embodiments, a TGF-beta superfamily type I receptor, type II receptor, or co-receptor fusion protein comprises an amino acid sequence as set forth in the formula A-B-C, wherein A is a TPA leader sequence, B consists of a TGF-beta superfamily type I receptor polypeptide, type II receptor polypeptide, or co-receptor polypeptide domain, and C is an immunoglobulin Fc domain. Preferred fusion proteins comprise the amino acid sequence set forth in any one of SEQ ID NOs: 101, 103, 104, 106, 107, 109, 601, 602, 603, 604, 605, 606, 801, 802, 803, 804, 805, 806, 901, 902, 903, 904, 905, and 906.

[0675] In some embodiments, heteromultimers of the present disclosure further comprise one or more heterologous portions (domains) so as to confer a desired property. For example, some fusion domains are particularly useful for isolation of the fusion proteins by affinity chromatography. Well-known examples of such fusion domains include, but are not limited to, polyhistidine, Glu-Glu, glutathione S-transferase (GST), thioredoxin, protein A, protein G, an immunoglobulin heavy-chain constant region (Fc), maltose binding protein (MBP), or human serum albumin. For the purpose of affinity purification, relevant matrices for affinity chromatography, such as glutathione-, amylase-, and nickel- or cobalt-conjugated resins are used. Many of such matrices are available in “kit” form, such as the Pharmacia GST purification system and the QIAexpress™ system (Qiagen) useful with (HIS₆) fusion partners. As another example, a fusion domain may be selected so as to facilitate detection of the ligand trap polypeptides. Examples of such detection domains include the various fluorescent proteins (e.g., GFP) as well as “epitope tags,” which are usually short peptide sequences for which a specific antibody is available. Well-known epitope tags for which specific monoclonal antibodies are readily available include FLAG, influenza virus hemagglutinin (HA), and c-myc tags. In some cases, the fusion domains have a protease cleavage site, such as for factor Xa or thrombin, which allows the relevant protease to partially digest the fusion proteins and thereby liberate the recombinant proteins therefrom. The liberated proteins can then be isolated from the fusion domain by subsequent chromatographic separation.

[0676] In certain embodiments, TGF-beta superfamily type I receptor polypeptides, type II receptor polypeptides, and/or co-receptor polypeptides of the present disclosure contain one or more modifications that are capable of stabilizing the polypeptides. For example, such modifications enhance the in vitro half-life of the polypeptides, enhance circulatory half-life of the polypeptides, and/or reduce proteolytic degradation of the polypeptides. Such stabilizing modifications include, but are not limited to, fusion proteins (including, for example, fusion proteins comprising a type I receptor polypeptide, type II receptor polypeptide, or co-receptor polypeptide domain and a stabilizer domain), modifications of a glycosylation site (including, for example, addition of a glycosylation site to a polypeptide of the disclosure), and modifications of carbohydrate moiety (including, for example, removal of carbohydrate moieties from a polypeptide of the disclosure). As used herein, the term “stabilizer domain” not only refers to a fusion domain (e.g., an immunoglobulin Fc domain) as in the case of fusion proteins, but also includes nonproteinaceous modifications such as a carbohydrate moiety, or nonproteinaceous moiety, such as polyethylene glycol.

[0677] In preferred embodiments, heteromultimers to be used in accordance with the methods described herein are isolated polypeptide complexes. As used herein, an isolated protein (or protein complex) or polypeptide (or polypeptide complex) is one which has been separated from a component of its natural environment. In some embodiments, a heteromultimer complex of the disclosure is purified to greater than 95%, 96%, 97%, 98%, or 99% purity as determined by, for example, electrophoretic (e.g., SDS-PAGE, isoelectric focusing (IEF), capillary electrophoresis) or chromatographic (e.g., ion exchange or reverse phase HPLC). Methods for assessment of antibody purity are well known in the art [See, e.g., Flatman et al., (2007) J. Chromatogr. B 848:79-87]. In some embodiments, heteromultimer preparations of the disclosure are substantially free of TGF-beta superfamily type I receptor polypeptide homomultimers, TGF-beta superfamily type II receptor polypeptide homomultimers, and/or TGF-beta superfamily co-receptor polypeptide homomultimers. For example, in some embodiments, heteromultimer preparations comprise less than about 10%, 9%, 8%, 7%, 5%, 4%, 3%, 2%, or less than 1% of TGF-beta superfamily type I receptor polypeptide homomultimers. In some embodiments, heteromultimer preparations comprise less than about 10%, 9%, 8%, 7%, 5%, 4%, 3%, 2%, or less than 1% of TGF-beta superfamily type II receptor polypeptide homomultimers. In some embodiments, heteromultimer preparations comprise less than about 10%, 9%, 8%, 7%, 5%, 4%, 3%, 2%, or less than 1% of TGF-beta superfamily co-receptor polypeptide homomultimers. In some embodiments, heteromultimer preparations comprise less than about 10%, 9%, 8%, 7%, 5%, 4%, 3%, 2%, or less than 1% of TGF-beta superfamily type I receptor polypeptide homomultimers and less than about 10%, 9%, 8%, 7%, 5%, 4%, 3%, 2%, or less than 1% of TGF-beta superfamily co-receptor polypeptide homomultimers. In some embodiments, heteromultimer preparations comprise less than about 10%, 9%, 8%, 7%, 5%, 4%, 3%, 2%, or less than 1% of TGF-beta superfamily type II receptor polypeptide homomultimers and less than about 10%, 9%, 8%, 7%, 5%, 4%, 3%, 2%, or less than 1% of TGF-beta superfamily co-receptor polypeptide homomultimers.

[0678] In certain embodiments, TGFβ superfamily type I receptor polypeptides, type II receptor polypeptides, and co-receptor polypeptides as well as heteromultimer complexes thereof, of the disclosure can be produced by a variety of art-known techniques. For example, polypeptides of the disclosure can be synthesized using standard protein chemistry techniques such as those described in Bodansky, M. Principles of Peptide Synthesis, Springer Verlag, Berlin (1993) and Grant G. A. (ed.), Synthetic Peptides: A User's Guide, W. H. Freeman and Company, New York (1992). In addition, automated peptide synthesizers are commercially available (see, e.g., Advanced ChemTech Model 396; Milligen/Biosearch 9600). Alternatively, the polypeptides and complexes of the disclosure, including fragments or variants thereof, may be recombinantly produced using various expression systems [e.g., E. coli, Chinese Hamster Ovary (CHO) cells, COS cells, baculovirus] as is well known in the art. In a further embodiment, the modified or unmodified polypeptides of the disclosure may be produced by digestion of recombinantly produced full-length TGFβ superfamily type I receptor, type II receptor and/or co-receptor polypeptides by using, for example, a protease, e.g., trypsin, thermolysin, chymotrypsin, pepsin, or paired basic amino acid converting enzyme (PACE). Computer analysis (using a commercially available software, e.g., MacVector, Omega, PCGene, Molecular Simulation, Inc.) can be used to identify proteolytic cleavage sites.

### B. Nucleic Acids Encoding TGFβ Superfamily Type I Receptor Polypeptides, Type II Receptor Polypeptides, and Co-Receptor Polypeptides

[0679] In certain embodiments, the present disclosure provides isolated and/or recombinant nucleic acids encoding TGFβ superfamily type I receptors, type II receptors, and co-receptors (including fragments, functional variants, and fusion proteins thereof) disclosed herein. For example, SEQ ID NO: 12 encodes a naturally occurring human ActRIIA precursor polypeptide, while SEQ ID NO: 13 encodes a mature, extracellular domain of ActRIIA. The subject nucleic acids may be single-stranded or double stranded. Such nucleic acids may be DNA or RNA molecules. These nucleic acids may be used, for example, in methods for making TGF-beta superfamily heteromultimers of the present disclosure.

[0680] In certain embodiments, nucleic acids encoding TGFβ superfamily type I receptor polypeptides, type II receptor polypeptides, and/or co-receptor polypeptides of the present disclosure are understood to include nucleic acids of any one of SEQ ID NOs: 7, 8, 12, 13, 16, 17, 20, 21, 24, 25, 28, 29, 32, 33, 36, 37, 40, 41, 44, 45, 48, 49, 52, 53, 69, 70, 73, 74, 77, 78, 81, 82, 85, 86, 89, 90, 93, 94, 303, 304, 307, 308, 311, 312, 503, 504, 507, 508, 511, 512, 515, 516, 519, 520, 523, 524, 527, 528, 531, 532, 535, 536, 539, 540, 543, 544, 547, 548, 551, 552, 555, 556, 559, 560, 563, 564, 567, 568, 571, 572, 575, 576, 579, 580, 583, 584, 587, 588, 591, 592, 594, 597, 598, 601, 602, 605, 606, 102, 105, 108, 808, and 811 as well as variants thereof. Variant nucleotide sequences include sequences that differ by one or more nucleotide substitutions, additions, or deletions including allelic variants, and therefore, will include coding sequences that differ from the nucleotide sequence designated in any one of SEQ ID NOs: 7, 8, 12, 13, 16, 17, 20, 21, 24, 25, 28, 29, 32, 33, 36, 37, 40, 41, 44, 45, 48, 49, 52, 53, 69, 70, 73, 74, 77, 78, 81, 82, 85, 86, 89, 90, 93, 94, 303, 304, 307, 308, 311, 312, 503, 504, 507, 508, 511, 512, 515, 516, 519, 520, 523, 524, 527, 528, 531, 532, 535, 536, 539, 540, 543, 544, 547, 548, 551, 552, 555, 556, 559, 560, 563, 564, 567, 568, 571, 572, 575, 576, 579, 580, 583, 584, 587, 588, 591, 592, 594, 597, 598, 601, 602, 605, 606, 102, 105, 108, 808, and 811.

[0681] In certain embodiments, TGFβ superfamily type I receptor polypeptides, type II receptor polypeptides, and/or co-receptor polypeptides of the present disclosure are encoded by isolated or recombinant nucleic acid sequences that are at least 70%, 75%, 80%, 85%, 90%, 91%, 92%, 93%, 94%, 95%, 96%, 97%, 98%, 99%, or 100% identical to SEQ ID NOs: 7, 8, 12, 13, 16, 17, 20, 21, 24, 25, 28, 29, 32, 33, 36, 37, 40, 41, 44, 45, 48, 49, 52, 53, 69, 70, 73, 74, 77, 78, 81, 82, 85, 86, 89, 90, 93, 94, 303, 304, 307, 308, 311, 312, 503, 504, 507, 508, 511, 512, 515, 516, 519, 520, 523, 524, 527, 528, 531, 532, 535, 536, 539, 540, 543, 544, 547, 548, 551, 552, 555, 556, 559, 560, 563, 564, 567, 568, 571, 572, 575, 576, 579, 580, 583, 584, 587, 588, 591, 592, 594, 597, 598, 601, 602, 605, 606, 102, 105, 108, 808, and 811. One of ordinary skill in the art will appreciate that nucleic acid sequences that are at least 70%, 75%, 80%, 85%, 90%, 91%, 92%, 93%, 94%, 95%, 96%, 97%, 98%, 99%, or 100% identical to the sequences complementary to SEQ ID NOs: 7, 8, 12, 13, 16, 17, 20, 21, 24, 25, 28, 29, 32, 33, 36, 37, 40, 41, 44, 45, 48, 49, 52, 53, 69, 70, 73, 74, 77, 78, 81, 82, 85, 86, 89, 90, 93, 94, 303, 304, 307, 308, 311, 312, 503, 504, 507, 508, 511, 512, 515, 516, 519, 520, 523, 524, 527, 528, 531, 532, 535, 536, 539, 540, 543, 544, 547, 548, 551, 552, 555, 556, 559, 560, 563, 564, 567, 568, 571, 572, 575, 576, 579, 580, 583, 584, 587, 588, 591, 592, 594, 597, 598, 601, 602, 605, 606, 102, 105, 108, 808, and 811 are also within the scope of the present disclosure. In further embodiments, the nucleic acid sequences of the disclosure can be isolated, recombinant, and/or fused with a heterologous nucleotide sequence or in a DNA library.

[0682] In other embodiments, nucleic acids of the present disclosure also include nucleotide sequences that hybridize under highly stringent conditions to the nucleotide sequence designated in SEQ ID NOs: 7, 8, 12, 13, 16, 17, 20, 21, 24, 25, 28, 29, 32, 33, 36, 37, 40, 41, 44, 45, 48, 49, 52, 53, 69, 70, 73, 74, 77, 78, 81, 82, 85, 86, 89, 90, 93, 94, 303, 304, 307, 308, 311, 312, 503, 504, 507, 508, 511, 512, 515, 516, 519, 520, 523, 524, 527, 528, 531, 532, 535, 536, 539, 540, 543, 544, 547, 548, 551, 552, 555, 556, 559, 560, 563, 564, 567, 568, 571, 572, 575, 576, 579, 580, 583, 584, 587, 588, 591, 592, 594, 597, 598, 601, 602, 605, 606, 102, 105, 108, 808, and 811, the complement sequence of SEQ ID NOs: 7, 8, 12, 13, 16, 17, 20, 21, 24, 25, 28, 29, 32, 33, 36, 37, 40, 41, 44, 45, 48, 49, 52, 53, 69, 70, 73, 74, 77, 78, 81, 82, 85, 86, 89, 90, 93, 94, 303, 304, 307, 308, 311, 312, 503, 504, 507, 508, 511, 512, 515, 516, 519, 520, 523, 524, 527, 528, 531, 532, 535, 536, 539, 540, 543, 544, 547, 548, 551, 552, 555, 556, 559, 560, 563, 564, 567, 568, 571, 572, 575, 576, 579, 580, 583, 584, 587, 588, 591, 592, 594, 597, 598, 601, 602, 605, 606, 102, 105, 108, 808, and 811, or fragments thereof. One of ordinary skill in the art will understand readily that appropriate stringency conditions which promote DNA hybridization can be varied. For example, one could perform the hybridization at 6.0× sodium chloride/sodium citrate (SSC) at about 45° C., followed by a wash of 2.0×SSC at 50° C. For example, the salt concentration in the wash step can be selected from a low stringency of about 2.0×SSC at 50° C. to a high stringency of about 0.2×SSC at 50° C. In addition, the temperature in the wash step can be increased from low stringency conditions at room temperature, about 22° C., to high stringency conditions at about 65° C. Both temperature and salt may be varied, or temperature or salt concentration may be held constant while the other variable is changed. In one embodiment, the disclosure provides nucleic acids which hybridize under low stringency conditions of 6×SSC at room temperature followed by a wash at 2×SSC at room temperature.

[0683] Isolated nucleic acids which differ from the nucleic acids as set forth in SEQ ID NOs: 7, 8, 12, 13, 16, 17, 20, 21, 24, 25, 28, 29, 32, 33, 36, 37, 40, 41, 44, 45, 48, 49, 52, 53, 69, 70, 73, 74, 77, 78, 81, 82, 85, 86, 89, 90, 93, 94, 303, 304, 307, 308, 311, 312, 503, 504, 507, 508, 511, 512, 515, 516, 519, 520, 523, 524, 527, 528, 531, 532, 535, 536, 539, 540, 543, 544, 547, 548, 551, 552, 555, 556, 559, 560, 563, 564, 567, 568, 571, 572, 575, 576, 579, 580, 583, 584, 587, 588, 591, 592, 594, 597, 598, 601, 602, 605, 606, 102, 105, 108, 808, and 811 due to degeneracy in the genetic code are also within the scope of the disclosure. For example, a number of amino acids are designated by more than one triplet. Codons that specify the same amino acid, or synonyms (for example, CAU and CAC are synonyms for histidine) may result in “silent” mutations which do not affect the amino acid sequence of the protein. However, it is expected that DNA sequence polymorphisms that do lead to changes in the amino acid sequences of the subject proteins will exist among mammalian cells. One skilled in the art will appreciate that these variations in one or more nucleotides (up to about 3-5% of the nucleotides) of the nucleic acids encoding a particular protein may exist among individuals of a given species due to natural allelic variation. Any and all such nucleotide variations and resulting amino acid polymorphisms are within the scope of this disclosure.

[0684] In certain embodiments, the recombinant nucleic acids of the present disclosure may be operably linked to one or more regulatory nucleotide sequences in an expression construct. Regulatory nucleotide sequences will generally be appropriate to the host cell used for expression. Numerous types of appropriate expression vectors and suitable regulatory sequences are known in the art for a variety of host cells. Typically, said one or more regulatory nucleotide sequences may include, but are not limited to, promoter sequences, leader or signal sequences, ribosomal binding sites, transcriptional start and termination sequences, translational start and termination sequences, and enhancer or activator sequences. Constitutive or inducible promoters as known in the art are contemplated by the disclosure. The promoters may be either naturally occurring promoters, or hybrid promoters that combine elements of more than one promoter. An expression construct may be present in a cell on an episome, such as a plasmid, or the expression construct may be inserted in a chromosome. In some embodiments, the expression vector contains a selectable marker gene to allow the selection of transformed host cells. Selectable marker genes are well known in the art and will vary with the host cell used.

[0685] In certain aspects of the present disclosure, the subject nucleic acid is provided in an expression vector comprising a nucleotide sequence encoding a TGFβ superfamily type I receptor polypeptide, type II receptor polypeptide, and/or co-receptor polypeptide and operably linked to at least one regulatory sequence. Regulatory sequences are art-recognized and are selected to direct expression of the TGFβ superfamily type I receptor polypeptide, type II receptor polypeptide, and/or co-receptor polypeptide. Accordingly, the term regulatory sequence includes promoters, enhancers, and other expression control elements. Exemplary regulatory sequences are described in Goeddel; Gene Expression Technology: Methods in Enzymology, Academic Press, San Diego, Calif. (1990). For instance, any of a wide variety of expression control sequences that control the expression of a DNA sequence when operatively linked to it may be used in these vectors to express DNA sequences encoding a TGFβ superfamily type I receptor polypeptide, type II receptor polypeptide, and/or co-receptor polypeptide. Such useful expression control sequences, include, for example, the early and late promoters of SV40, tet promoter, adenovirus or cytomegalovirus immediate early promoter, RSV promoters, the lac system, the trp system, the TAC or TRC system, T7 promoter whose expression is directed by T7 RNA polymerase, the major operator and promoter regions of phage lambda, the control regions for fd coat protein, the promoter for 3-phosphoglycerate kinase or other glycolytic enzymes, the promoters of acid phosphatase, e.g., Pho5, the promoters of the yeast α-mating factors, the polyhedron promoter of the baculovirus system and other sequences known to control the expression of genes of prokaryotic or eukaryotic cells or their viruses, and various combinations thereof. It should be understood that the design of the expression vector may depend on such factors as the choice of the host cell to be transformed and/or the type of protein desired to be expressed. Moreover, the vector's copy number, the ability to control that copy number and the expression of any other protein encoded by the vector, such as antibiotic markers, should also be considered.

[0686] A recombinant nucleic acid of the present disclosure can be produced by ligating the cloned gene, or a portion thereof, into a vector suitable for expression in either prokaryotic cells, eukaryotic cells (yeast, avian, insect or mammalian), or both. Expression vehicles for production of a recombinant TGFβ superfamily type I receptor polypeptide, type II receptor polypeptide, and/or co-receptor polypeptide include plasmids and other vectors. For instance, suitable vectors include plasmids of the following types: pBR322-derived plasmids, pEMBL-derived plasmids, pEX-derived plasmids, pBTac-derived plasmids and pUC-derived plasmids for expression in prokaryotic cells, such as E. coli.

[0687] Some mammalian expression vectors contain both prokaryotic sequences to facilitate the propagation of the vector in bacteria, and one or more eukaryotic transcription units that are expressed in eukaryotic cells. The pcDNAI/amp, pcDNAI/neo, pRc/CMV, pSV2gpt, pSV2neo, pSV2-dhfr, pTk2, pRSVneo, pMSG, pSVT7, pko-neo and pHyg derived vectors are examples of mammalian expression vectors suitable for transfection of eukaryotic cells. Some of these vectors are modified with sequences from bacterial plasmids, such as pBR322, to facilitate replication and drug resistance selection in both prokaryotic and eukaryotic cells. Alternatively, derivatives of viruses such as the bovine papilloma virus (BPV-1), or Epstein-Barr virus (pHEBo, pREP-derived and p205) can be used for transient expression of proteins in eukaryotic cells. Examples of other viral (including retroviral) expression systems can be found below in the description of gene therapy delivery systems. The various methods employed in the preparation of the plasmids and in transformation of host organisms are well known in the art. For other suitable expression systems for both prokaryotic and eukaryotic cells, as well as general recombinant procedures, see, e.g., Molecular Cloning A Laboratory Manual, 3rd Ed., ed. by Sambrook, Fritsch and Maniatis (Cold Spring Harbor Laboratory Press, 2001). In some instances, it may be desirable to express the recombinant polypeptides by the use of a baculovirus expression system. Examples of such baculovirus expression systems include pVL-derived vectors (such as pVL1392, pVL1393 and pVL941), pAcUW-derived vectors (such as pAcUW1), and pBlueBac-derived vectors (such as the β-gal containing pBlueBac III).

[0688] In a preferred embodiment, a vector will be designed for production of the subject TGFβ superfamily type I receptor polypeptides, type II receptor polypeptides, and/or co-receptor polypeptides in CHO cells, such as a Pcmv-Script vector (Stratagene, La Jolla, Calif.), pcDNA4 vectors (Invitrogen, Carlsbad, Calif.) and pCI-neo vectors (Promega, Madison, Wis.). As will be apparent, the subject gene constructs can be used to cause expression of the subject TGFβ superfamily type I receptor polypeptides, type II receptor polypeptides, and/or co-receptor polypeptides in cells propagated in culture, e.g., to produce proteins, including fusion proteins or variant proteins, for purification.

[0689] This disclosure also pertains to a host cell transfected with a recombinant gene including a coding sequence for one or more of the subject TGFβ superfamily type I receptor polypeptides, type II receptor polypeptides, and/or co-receptor polypeptides. The host cell may be any prokaryotic or eukaryotic cell. For example, a TGFβ superfamily type I receptor polypeptide, type II receptor polypeptide, and/or co-receptor polypeptide of the disclosure may be expressed in bacterial cells such as E. coli, insect cells (e.g., using a baculovirus expression system), yeast, or mammalian cells [e.g. a Chinese hamster ovary (CHO) cell line]. Other suitable host cells are known to those skilled in the art.

[0690] Accordingly, the present disclosure further pertains to methods of producing the subject TGFβ superfamily type I receptor polypeptides, type II receptor polypeptides, and/or co-receptor polypeptides. For example, a host cell transfected with an expression vector encoding a TGFβ superfamily type I receptor polypeptide, type II receptor polypeptide, and/or co-receptor polypeptide can be cultured under appropriate conditions to allow expression of the TGFβ superfamily type I receptor polypeptide, type II receptor polypeptide, and/or co-receptor polypeptide to occur. The polypeptide may be secreted and isolated from a mixture of cells and medium containing the polypeptide. Alternatively, the TGFβ superfamily type I receptor polypeptide, type II receptor polypeptide, and/or co-receptor polypeptide may be isolated from a cytoplasmic or membrane fraction obtained from harvested and lysed cells. A cell culture includes host cells, media and other byproducts. Suitable media for cell culture are well known in the art. The subject polypeptides can be isolated from cell culture medium, host cells, or both, using techniques known in the art for purifying proteins, including ion-exchange chromatography, gel filtration chromatography, ultrafiltration, electrophoresis, immunoaffinity purification with antibodies specific for particular epitopes of the TGFβ superfamily type I receptor polypeptides, type II receptor polypeptides, and/or co-receptor polypeptides and affinity purification with an agent that binds to a domain fused to TGFβ superfamily type I receptor polypeptides, type II receptor polypeptides, and/or co-receptor polypeptides (e.g., a protein A column may be used to purify a TGFβ superfamily type I receptor-Fc fusion protein, type II receptor-Fc fusion protein, and/or co-receptor-Fc fusion protein). In some embodiments, the TGFβ superfamily type I receptor polypeptide, type II receptor polypeptide, and/or co-receptor polypeptide is a fusion protein containing a domain which facilitates its purification.

[0691] In some embodiments, purification is achieved by a series of column chromatography steps, including, for example, three or more of the following, in any order: protein A chromatography, Q sepharose chromatography, phenylsepharose chromatography, size exclusion chromatography, and cation exchange chromatography. The purification could be completed with viral filtration and buffer exchange. A TGFβ superfamily type I receptor-Fc fusion protein, type II receptor-Fc fusion protein, and/or co-receptor-Fc fusion protein may be purified to a purity of >90%, >95%, >96%, >98%, or >99% as determined by size exclusion chromatography and >90%, >95%, >96%, >98%, or >99% as determined by SDS PAGE. The target level of purity should be one that is sufficient to achieve desirable results in mammalian systems, particularly non-human primates, rodents (mice), and humans.

[0692] In another embodiment, a fusion gene coding for a purification leader sequence, such as a poly-(His)/enterokinase cleavage site sequence at the N-terminus of the desired portion of the recombinant TGFβ superfamily type I receptor polypeptide, type II receptor polypeptide, and/or co-receptor polypeptide, can allow purification of the expressed fusion protein by affinity chromatography using a Ni²⁺ metal resin. The purification leader sequence can then be subsequently removed by treatment with enterokinase to provide the purified TGFβ superfamily type I receptor polypeptide, type II receptor polypeptide, and/or co-receptor polypeptide. See, e.g., Hochuli et al. (1987) J. Chromatography 411:177; and Janknecht et al. (1991) PNAS USA 88:8972.

[0693] Techniques for making fusion genes are well known. Essentially, the joining of various DNA fragments coding for different polypeptide sequences is performed in accordance with conventional techniques, employing blunt-ended or stagger-ended termini for ligation, restriction enzyme digestion to provide for appropriate termini, filling-in of cohesive ends as appropriate, alkaline phosphatase treatment to avoid undesirable joining, and enzymatic ligation. In another embodiment, the fusion gene can be synthesized by conventional techniques including automated DNA synthesizers. Alternatively, PCR amplification of gene fragments can be carried out using anchor primers which give rise to complementary overhangs between two consecutive gene fragments which can subsequently be annealed to generate a chimeric gene sequence. See, e.g., Current Protocols in Molecular Biology, eds. Ausubel et al., John Wiley & Sons: 1992.

### 4. Screening Assays

[0694] In certain aspects, the present disclosure relates to the use of TGFβ superfamily heteromultimers (e.g., a TGFβ superfamily co-receptor heteromultimer) to identify compounds (agents) which are agonists or antagonists of TGFβ superfamily receptors. Compounds identified through this screening can be tested to assess their ability to modulate tissues such as bone, cartilage, muscle, fat, and/or neurons, to assess their ability to modulate tissue growth in vivo or in vitro. These compounds can be tested, for example, in animal models.

[0695] There are numerous approaches to screening for therapeutic agents for modulating tissue growth by targeting TGFβ superfamily ligand signaling (e.g., SMAD signaling). In certain embodiments, high-throughput screening of compounds can be carried out to identify agents that perturb TGFβ superfamily receptor-mediated effects on a selected cell line. In certain embodiments, the assay is carried out to screen and identify compounds that specifically inhibit or reduce binding of a TGF-beta superfamily heteromultimer to its binding partner, such as a TGFβ superfamily ligand (e.g., BMP2, BMP2/7, BMP3, BMP4, BMP4/7, BMP5, BMP6, BMP7, BMP8a, BMP8b, BMP9, BMP10, GDF3, GDF5, GDF6/BMP13, GDF7, GDF8, GDF9b/BMP15, GDF11/BMP11, GDF15/MIC1, TGF-β1, TGF-β2, TGF-β3, activin A, activin B, activin C, activin E, activin AB, activin AC, activin AE, activin BC, activin BE, nodal, glial cell-derived neurotrophic factor (GDNF), neurturin, artemin, persephin, MIS, and Lefty). Alternatively, the assay can be used to identify compounds that enhance binding of a TGF-beta superfamily heteromultimer to its binding partner such as a TGFβ superfamily ligand. In a further embodiment, the compounds can be identified by their ability to interact with a TGF-beta superfamily heteromultimer of the disclosure.

[0696] A variety of assay formats will suffice and, in light of the present disclosure, those not expressly described herein will nevertheless be comprehended by one of ordinary skill in the art. As described herein, the test compounds (agents) of the invention may be created by any combinatorial chemical method. Alternatively, the subject compounds may be naturally occurring biomolecules synthesized in vivo or in vitro. Compounds (agents) to be tested for their ability to act as modulators of tissue growth can be produced, for example, by bacteria, yeast, plants or other organisms (e.g., natural products), produced chemically (e.g., small molecules, including peptidomimetics), or produced recombinantly. Test compounds contemplated by the present invention include non-peptidyl organic molecules, peptides, polypeptides, peptidomimetics, sugars, hormones, and nucleic acid molecules. In certain embodiments, the test agent is a small organic molecule having a molecular weight of less than about 2,000 Daltons.

[0697] The test compounds of the disclosure can be provided as single, discrete entities, or provided in libraries of greater complexity, such as made by combinatorial chemistry. These libraries can comprise, for example, alcohols, alkyl halides, amines, amides, esters, aldehydes, ethers and other classes of organic compounds. Presentation of test compounds to the test system can be in either an isolated form or as mixtures of compounds, especially in initial screening steps. Optionally, the compounds may be optionally derivatized with other compounds and have derivatizing groups that facilitate isolation of the compounds. Non-limiting examples of derivatizing groups include biotin, fluorescein, digoxygenin, green fluorescent protein, isotopes, polyhistidine, magnetic beads, glutathione S-transferase (GST), photoactivatable crosslinkers or any combinations thereof.

[0698] In many drug-screening programs which test libraries of compounds and natural extracts, high-throughput assays are desirable in order to maximize the number of compounds surveyed in a given period of time. Assays which are performed in cell-free systems, such as may be derived with purified or semi-purified proteins, are often preferred as “primary” screens in that they can be generated to permit rapid development and relatively easy detection of an alteration in a molecular target which is mediated by a test compound. Moreover, the effects of cellular toxicity or bioavailability of the test compound can be generally ignored in the in vitro system, the assay instead being focused primarily on the effect of the drug on the molecular target as may be manifest in an alteration of binding affinity between a TGF-beta superfamily heteromultimer and its binding partner (e.g., BMP2, BMP2/7, BMP3, BMP4, BMP4/7, BMP5, BMP6, BMP7, BMP8a, BMP8b, BMP9, BMP10, GDF3, GDF5, GDF6/BMP13, GDF7, GDF8, GDF9b/BMP15, GDF11/BMP11, GDF15/MIC1, TGF-β1, TGF-β2, TGF-β3, activin A, activin B, activin C, activin E, activin AB, activin AC, activin AE, activin BC, activin BE, nodal, glial cell-derived neurotrophic factor (GDNF), neurturin, artemin, persephin, MIS, and Lefty).

[0699] Merely to illustrate, in an exemplary screening assay of the present disclosure, the compound of interest is contacted with an isolated and purified TGF-beta superfamily heteromultimercomplex which is ordinarily capable of binding to a TGF-beta superfamily ligand, as appropriate for the intention of the assay. To the mixture of the compound and TGF-beta superfamily heteromultimer is then added to a composition containing the appropriate TGF-beta superfamily ligand (e.g., BMP2, BMP2/7, BMP3, BMP4, BMP4/7, BMP5, BMP6, BMP7, BMP8a, BMP8b, BMP9, BMP10, GDF3, GDF5, GDF6/BMP13, GDF7, GDF8, GDF9b/BMP15, GDF11/BMP11, GDF15/MIC1, TGF-β1, TGF-β2, TGF-β3, activin A, activin B, activin C, activin E, activin AB, activin AC, activin AE, activin BC, activin BE, nodal, glial cell-derived neurotrophic factor (GDNF), neurturin, artemin, persephin, MIS, and Lefty). Detection and quantification of heteromultimer-superfamily ligand complexes provides a means for determining the compound's efficacy at inhibiting (or potentiating) complex formation between the TGF-beta superfamily heteromultimer complex and its binding protein. The efficacy of the compound can be assessed by generating dose-response curves from data obtained using various concentrations of the test compound. Moreover, a control assay can also be performed to provide a baseline for comparison. For example, in a control assay, isolated and purified TGF-beta superfamily ligand is added to a composition containing the TGF-beta superfamily heteromultimer, and the formation of heteromultimer-ligand complex is quantitated in the absence of the test compound. It will be understood that, in general, the order in which the reactants may be admixed can be varied, and can be admixed simultaneously. Moreover, in place of purified proteins, cellular extracts and lysates may be used to render a suitable cell-free assay system.

[0700] Binding of a TGF-beta superfamily heteromultimer to another protein may be detected by a variety of techniques. For instance, modulation of the formation of complexes can be quantitated using, for example, detectably labeled proteins such as radiolabeled (e.g., ³²P, ³⁵S, ¹⁴C or ³H), fluorescently labeled (e.g., FITC), or enzymatically labeled TGF-beta superfamily heteromultimer and/or its binding protein, by immunoassay, or by chromatographic detection.

[0701] In certain embodiments, the present disclosure contemplates the use of fluorescence polarization assays and fluorescence resonance energy transfer (FRET) assays in measuring, either directly or indirectly, the degree of interaction between a TGF-beta superfamily heteromultimer and its binding protein. Further, other modes of detection, such as those based on optical waveguides (see, e.g., PCT Publication WO 96/26432 and U.S. Pat. No. 5,677,196), surface plasmon resonance (SPR), surface charge sensors, and surface force sensors, are compatible with many embodiments of the disclosure.

[0702] Moreover, the present disclosure contemplates the use of an interaction trap assay, also known as the “two-hybrid assay,” for identifying agents that disrupt or potentiate interaction between a TGF-beta superfamily heteromultimer and its binding partner. See, e.g., U.S. Pat. No. 5,283,317; Zervos et al. (1993) Cell 72:223-232; Madura et al. (1993) J Biol Chem 268:12046-12054; Bartel et al. (1993) Biotechniques 14:920-924; and Iwabuchi et al. (1993) Oncogene 8:1693-1696). In a specific embodiment, the present disclosure contemplates the use of reverse two-hybrid systems to identify compounds (e.g., small molecules or peptides) that dissociate interactions between a TGF-beta superfamily heteromultimer and its binding protein [see, e.g., Vidal and Legrain, (1999) Nucleic Acids Res 27:919-29; Vidal and Legrain, (1999) Trends Biotechnol 17:374-81; and U.S. Pat. Nos. 5,525,490; 5,955,280; and 5,965,368].

[0703] In certain embodiments, the subject compounds are identified by their ability to interact with a TGF-beta superfamily heteromultimer of the disclosure. The interaction between the compound and the TGF-beta superfamily heteromultimer may be covalent or non-covalent. For example, such interaction can be identified at the protein level using in vitro biochemical methods, including photo-crosslinking, radiolabeled ligand binding, and affinity chromatography. See, e.g., Jakoby W B et al. (1974) Methods in Enzymology 46:1. In certain cases, the compounds may be screened in a mechanism-based assay, such as an assay to detect compounds which bind to a TGF-beta superfamily heteromultimer. This may include a solid-phase or fluid-phase binding event. Alternatively, the gene encoding a TGF-beta superfamily heteromultimer can be transfected with a reporter system (e.g., β-galactosidase, luciferase, or green fluorescent protein) into a cell and screened against the library preferably by high-throughput screening or with individual members of the library. Other mechanism-based binding assays may be used; for example, binding assays which detect changes in free energy. Binding assays can be performed with the target fixed to a well, bead or chip or captured by an immobilized antibody or resolved by capillary electrophoresis. The bound compounds may be detected usually using colorimetric endpoints or fluorescence or surface plasmon resonance.

### 5. Exemplary Therapeutic Uses

[0704] In aspects embodiments, a TGF-beta superfamily heteromultimer, or combination of TGF-beta superfamily heteromultimers, of the present disclosure can be administered to a patient in need thereof. In some embodiments, the present invention provides methods of treating a disorder or condition in a patient in need thereof by administering to the patient a therapeutically effective amount of a TGF-beta superfamily heteromultimer, or combination of TGF-beta superfamily heteromultimers, as described herein. In some embodiments, the present invention provides methods of preventing a disorder or condition in a patient in need thereof by administering to the patient a therapeutically effective amount of a TGF-beta superfamily heteromultimer, or combination of TGF-beta superfamily heteromultimers, as described herein. In some embodiments, the present invention provides methods of delaying the progression or onset a disorder or condition in a patient in need thereof by administering to the patient a therapeutically effective amount of a TGF-beta superfamily heteromultimer, or combination of TGF-beta superfamily heteromultimers, as described herein. In some embodiments, the present invention provides methods of treating one or more complications of a disorder or condition in a patient in need thereof by administering to the patient a therapeutically effective amount of a TGF-beta superfamily heteromultimer, or combination of TGF-beta superfamily heteromultimers, as described herein. In some embodiments, the disorder or condition is one or more of: anemia, a thalassemia, myelodysplastic syndrome (MDS), sickle cell disease, and a bone-related disorder (e.g., a bone-related disorder associated with one or more of low bone density, low bone strength, and/or low bone growth). In some embodiments, the methods of the disclosure relate to increasing bone growth in a patient in need thereof. In some embodiments, the methods of the disclosure relate to increasing bone strength in a patient in need thereof. In some embodiments, the methods of the disclosure relate to increasing bone density (e.g., bone mineral density) in a patient in need thereof. In some embodiments, the methods of the disclosure relate to increasing red blood cell levels in a patient in need thereof. In some embodiments, the methods of the disclosure relate to increasing hemoglobin levels in a patient in need thereof. Optionally, any of the TGF-beta superfamily heteromultimers of the present disclosure can potentially be employed individually or in combination for therapeutic uses disclosed herein. These methods are particularly aimed at therapeutic and prophylactic treatments of mammals including, for example, rodents, primates, and humans.

[0705] As used herein, a therapeutic that “prevents” a disorder or condition refers to a compound that, in a statistical sample, reduces the occurrence of the disorder or condition in the treated sample relative to an untreated control sample, or delays the onset or reduces the severity of one or more symptoms of the disorder or condition relative to the untreated control sample. The term “treating” as used herein includes amelioration or elimination of the condition once it has been established. In either case, prevention or treatment may be discerned in the diagnosis provided by a physician or other health care provider and the intended result of administration of the therapeutic agent.

[0706] In certain embodiments, a TGF-beta superfamily heteromultimer, or combinations of TGF-beta superfamily heteromultimers, of the present disclosure may be used in methods of inducing bone and/or cartilage formation, preventing bone loss, increasing bone mineralization, preventing the demineralization of bone, and/or increasing bone density. TGF-beta superfamily heteromultimers may be useful in patients who are diagnosed with subclinical low bone density, as a protective measure against the development of osteoporosis.

[0707] In some embodiments, a TGF-beta superfamily heteromultimer, or combinations of TGF-beta superfamily heteromultimers, of the present disclosure may find medical utility in the healing of bone fractures and cartilage defects in humans and other animals. The subject methods and compositions may also have prophylactic use in closed as well as open fracture reduction and also in the improved fixation of artificial joints. De novo bone formation induced by an osteogenic agent is useful for repair of craniofacial defects that are congenital, trauma-induced, or caused by oncologic resection, and is also useful in cosmetic plastic surgery. Further, methods and compositions of the invention may be used in the treatment of periodontal disease and in other tooth repair processes. In certain cases, a TGF-beta superfamily heteromultimer, or combinations of TGF-beta superfamily heteromultimers, may provide an environment to attract bone-forming cells, stimulate growth of bone-forming cells, or induce differentiation of progenitors of bone-forming cells. TGF-beta superfamily heteromultimers of the disclosure may also be useful in the treatment of osteoporosis. Further, TGF-beta superfamily heteromultimers may be used in repair of cartilage defects and prevention/reversal of osteoarthritis.

[0708] In some embodiments, methods and compositions of the disclosure can be applied to conditions characterized by or causing bone loss, such as osteoporosis (including secondary osteoporosis), hyperparathyroidism, mineral bone disorder, sex hormone deprivation or ablation (e.g. androgen and/or estrogen), glucocorticoid treatment, rheumatoid arthritis, severe burns, hyperparathyroidism, hypercalcemia, hypocalcemia, hypophosphatemia, osteomalacia (including tumor-induced osteomalacia), hyperphosphatemia, vitamin D deficiency, hyperparathyroidism (including familial hyperparathyroidism) and pseudohypoparathyroidism, tumor metastases to bone, bone loss as a consequence of a tumor or chemotherapy, tumors of the bone and bone marrow (e.g., multiple myeloma), ischemic bone disorders, periodontal disease and oral bone loss, Cushing's disease, Paget's disease, thyrotoxicosis, chronic diarrheal state or malabsorption, renal tubular acidosis, or anorexia nervosa. Methods and compositions of the invention may also be applied to conditions characterized by a failure of bone formation or healing, including non-union fractures, fractures that are otherwise slow to heal, fetal and neonatal bone dysplasias (e.g., hypocalcemia, hypercalcemia, calcium receptor defects and vitamin D deficiency), osteonecrosis (including osteonecrosis of the jaw) and osteogenesis imperfecta. Additionally, the anabolic effects will cause such antagonists to diminish bone pain associated with bone damage or erosion. As a consequence of the anti-resorptive effects, such antagonists may be useful to treat disorders of abnormal bone formation, such as osteoblastic tumor metastases (e.g., associated with primary prostate or breast cancer), osteogenic osteosarcoma, osteopetrosis, progressive diaphyseal dysplasia, endosteal hyperostosis, osteopoikilosis, and melorheostosis. Other disorders that may be treated include fibrous dysplasia and chondrodysplasias.

[0709] In another specific embodiment, the disclosure provides a therapeutic method and composition for repairing fractures and other conditions related to cartilage and/or bone defects or periodontal diseases. The invention further provides therapeutic methods and compositions for wound healing and tissue repair. The types of wounds include, but are not limited to, burns, incisions and ulcers. See, e.g., PCT Publication No. WO 84/01106. Such compositions comprise a therapeutically effective amount of at least one of the TGF-beta superfamily heteromultimers of the disclosure in admixture with a pharmaceutically acceptable vehicle, carrier, or matrix.

[0710] In some embodiments, a TGF-beta superfamily heteromultimer, or combinations of TGF-beta superfamily heteromultimers, of the disclosure can be applied to conditions causing bone loss such as osteoporosis, hyperparathyroidism, Cushing's disease, thyrotoxicosis, chronic diarrheal state or malabsorption, renal tubular acidosis, or anorexia nervosa. It is commonly appreciated that being female, having a low body weight, and leading a sedentary lifestyle are risk factors for osteoporosis (loss of bone mineral density, leading to fracture risk). However, osteoporosis can also result from the long-term use of certain medications. Osteoporosis resulting from drugs or another medical condition is known as secondary osteoporosis. In Cushing's disease, the excess amount of cortisol produced by the body results in osteoporosis and fractures. The most common medications associated with secondary osteoporosis are the corticosteroids, a class of drugs that act like cortisol, a hormone produced naturally by the adrenal glands. Although adequate levels of thyroid hormones are needed for the development of the skeleton, excess thyroid hormone can decrease bone mass over time. Antacids that contain aluminum can lead to bone loss when taken in high doses. Other medications that can cause secondary osteoporosis include phenytoin (Dilantin) and barbiturates that are used to prevent seizures; methotrexate (Rheumatrex, Immunex, Folex PFS), a drug for some forms of arthritis, cancer, and immune disorders; cyclosporine (Sandimmune, Neoral), a drug used to treat some autoimmune diseases and to suppress the immune system in organ transplant patients; luteinizing hormone-releasing hormone agonists (Lupron, Zoladex), used to treat prostate cancer and endometriosis; heparin (Calciparine, Liquaemin), an anticlotting medication; and cholestyramine (Questran) and colestipol (Colestid), used to treat high cholesterol. Bone loss resulting from cancer therapy is widely recognized and termed cancer therapy-induced bone loss (CTIBL). Bone metastases can create cavities in the bone that may be corrected by treatment with a TGF-beta superfamily heteromultimer. Bone loss can also be caused by gum disease, a chronic infection in which bacteria located in gum recesses produce toxins and harmful enzymes.

[0711] In a further embodiment, the present disclosure provides methods and therapeutic agents for treating diseases or disorders associated with abnormal or unwanted bone growth. For example, patients with the congenital disorder fibrodysplasia ossificans progressiva (FOP) are afflicted by progressive ectopic bone growth in soft tissues spontaneously or in response to tissue trauma, with a major impact on quality of life. Additionally, abnormal bone growth can occur after hip replacement surgery and thus ruin the surgical outcome. This is a more common example of pathological bone growth and a situation in which the subject methods and compositions may be therapeutically useful. The same methods and compositions may also be useful for treating other forms of abnormal bone growth (e.g., pathological growth of bone following trauma, burns or spinal cord injury), and for treating or preventing the undesirable conditions associated with the abnormal bone growth seen in connection with metastatic prostate cancer or osteosarcoma.

[0712] In certain embodiments, a TGF-beta superfamily heteromultimer, or combinations of TGF-beta superfamily heteromultimers, of the disclosure may be used to promote bone formation in patients with cancer. Patients having certain tumors are at high risk for bone loss due to tumor-induced bone loss, bone metastases, and therapeutic agents. Generally, DEXA scans are employed to assess changes in bone density, while indicators of bone remodeling may be used to assess the likelihood of bone metastases. Serum markers may be monitored. Bone specific alkaline phosphatase (BSAP) is an enzyme that is present in osteoblasts. Blood levels of BSAP are increased in patients with bone metastasis and other conditions that result in increased bone remodeling. Osteocalcin and procollagen peptides are also associated with bone formation and bone metastases. Increases in BSAP have been detected in patients with bone metastasis caused by prostate cancer, and to a lesser degree, in bone metastases from breast cancer. BMP7 levels are high in prostate cancer that has metastasized to bone, but not in bone metastases due to bladder, skin, liver, or lung cancer. Type I carboxy-terminal telopeptide (ICTP) is a crosslink found in collagen that is formed during to the resorption of bone. Since bone is constantly being broken down and reformed, ICTP will be found throughout the body. However, at the site of bone metastasis, the level will be significantly higher than in an area of normal bone. ICTP has been found in high levels in bone metastasis due to prostate, lung, and breast cancer. Another collagen crosslink, Type I N-terminal telopeptide (NTx), is produced along with ICTP during bone turnover. The amount of NTx is increased in bone metastasis caused by many different types of cancer including lung, prostate, and breast cancer. Also, the levels of NTx increase with the progression of the bone metastasis. Therefore, this marker can be used to both detect metastasis as well as measure the extent of the disease. Other markers of resorption include pyridinoline and deoxypyridinoline. Any increase in resorption markers or markers of bone metastases indicate the need for therapy with a TGF-beta superfamily heteromultimer, or combinations of TGF-beta superfamily heteromultimers, in a patient.

[0713] A TGF-beta superfamily heteromultimer, or combinations of TGF-beta superfamily heteromultimers, of the disclosure may be conjointly administered with other bone-active pharmaceutical agents. Conjoint administration may be accomplished by administration of a single co-formulation, by simultaneous administration, or by administration at separate times. TGF-beta superfamily heteromultimer complexes may be particularly advantageous if administered with other bone-active agents. A patient may benefit from conjointly receiving a TGF-beta superfamily heteromultimer complex and taking calcium supplements, vitamin D, appropriate exercise and/or, in some cases, other medication. Examples of other medications include, bisphosphonates (alendronate, ibandronate and risedronate), calcitonin, estrogens, parathyroid hormone and raloxifene. The bisphosphonates (alendronate, ibandronate and risedronate), calcitonin, estrogens and raloxifene affect the bone remodeling cycle and are classified as anti-resorptive medications. Bone remodeling consists of two distinct stages: bone resorption and bone formation. Anti-resorptive medications slow or stop the bone-resorbing portion of the bone-remodeling cycle but do not slow the bone-forming portion of the cycle. As a result, new formation continues at a greater rate than bone resorption, and bone density may increase over time. Teriparatide, a form of parathyroid hormone, increases the rate of bone formation in the bone remodeling cycle. Alendronate is approved for both the prevention (5 mg per day or 35 mg once a week) and treatment (10 mg per day or 70 mg once a week) of postmenopausal osteoporosis. Alendronate reduces bone loss, increases bone density and reduces the risk of spine, wrist and hip fractures. Alendronate also is approved for treatment of glucocorticoid-induced osteoporosis in men and women as a result of long-term use of these medications (i.e., prednisone and cortisone) and for the treatment of osteoporosis in men. Alendronate plus vitamin D is approved for the treatment of osteoporosis in postmenopausal women (70 mg once a week plus vitamin D), and for treatment to improve bone mass in men with osteoporosis. Ibandronate is approved for the prevention and treatment of postmenopausal osteoporosis. Taken as a once-a-month pill (150 mg), ibandronate should be taken on the same day each month. Ibandronate reduces bone loss, increases bone density and reduces the risk of spine fractures. Risedronate is approved for the prevention and treatment of postmenopausal osteoporosis. Taken daily (5 mg dose) or weekly (35 mg dose or 35 mg dose with calcium), risedronate slows bone loss, increases bone density and reduces the risk of spine and non-spine fractures. Risedronate also is approved for use by men and women to prevent and/or treat glucocorticoid-induced osteoporosis that results from long-term use of these medications (i.e., prednisone or cortisone). Calcitonin is a naturally occurring hormone involved in calcium regulation and bone metabolism. In women who are more than 5 years beyond menopause, calcitonin slows bone loss, increases spinal bone density, and may relieve the pain associated with bone fractures. Calcitonin reduces the risk of spinal fractures. Calcitonin is available as an injection (50-100 IU daily) or nasal spray (200 IU daily).

[0714] A patient may also benefit from conjointly receiving a TGF-beta superfamily heteromultimer, or combinations of TGF-beta superfamily heteromultimers, and additional bone-active medications. Estrogen therapy (ET)/hormone therapy (HT) is approved for the prevention of osteoporosis. ET has been shown to reduce bone loss, increase bone density in both the spine and hip, and reduce the risk of hip and spinal fractures in postmenopausal women. ET is administered most commonly in the form of a pill or skin patch that delivers a low dose of approximately 0.3 mg daily or a standard dose of approximately 0.625 mg daily and is effective even when started after age 70. When estrogen is taken alone, it can increase a woman's risk of developing cancer of the uterine lining (endometrial cancer). To eliminate this risk, healthcare providers prescribe the hormone progestin in combination with estrogen (hormone replacement therapy or HT) for those women who have an intact uterus. ET/HT relieves menopause symptoms and has been shown to have a beneficial effect on bone health. Side effects may include vaginal bleeding, breast tenderness, mood disturbances and gallbladder disease. Raloxifene, 60 mg a day, is approved for the prevention and treatment of postmenopausal osteoporosis. It is from a class of drugs called Selective Estrogen Receptor Modulators (SERMs) that have been developed to provide the beneficial effects of estrogens without their potential disadvantages. Raloxifene increases bone mass and reduces the risk of spine fractures. Data are not yet available to demonstrate that raloxifene can reduce the risk of hip and other non-spine fractures. Teriparatide, a form of parathyroid hormone, is approved for the treatment of osteoporosis in postmenopausal women and men who are at high risk for a fracture. This medication stimulates new bone formation and significantly increases bone mineral density. In postmenopausal women, fracture reduction was noted in the spine, hip, foot, ribs and wrist. In men, fracture reduction was noted in the spine, but there were insufficient data to evaluate fracture reduction at other sites. Teriparatide is self-administered as a daily injection for up to 24 months.

[0715] In certain aspects, a TGF-beta superfamily heteromultimer, or combinations of TGF-beta superfamily heteromultimers, of the present disclosure can be used to increase red blood cell levels, treat or prevent an anemia, and/or treat or prevent ineffective erythropoiesis in a subject in need thereof. In certain aspects, a TGF-beta superfamily heteromultimer, or combinations of TGF-beta superfamily heteromultimers, of the present disclosure may be used in combination with conventional therapeutic approaches for increasing red blood cell levels, particularly those used to treat anemias of multifactorial origin. Conventional therapeutic approaches for increasing red blood cell levels include, for example, red blood cell transfusion, administration of one or more EPO receptor activators, hematopoietic stem cell transplantation, immunosuppressive biologics and drugs (e.g., corticosteroids). In certain embodiments, a TGF-beta superfamily heteromultimer, or combinations of TGF-beta superfamily heteromultimers, of the present disclosure can be used to treat or prevent ineffective erythropoiesis and/or the disorders associated with ineffective erythropoiesis in a subject in need thereof. In certain aspects, a TGF-beta superfamily heteromultimer, or combinations of TGF-beta superfamily heteromultimers, of the present disclosure can be used in combination with conventional therapeutic approaches for treating or preventing an anemia or ineffective erythropoiesis disorder, particularly those used to treat anemias of multifactorial origin.

[0716] In certain embodiments, a TGF-beta superfamily heteromultimer, or combinations of TGF-beta superfamily heteromultimers, optionally combined with an EPO receptor activator, may be used to increase red blood cell, hemoglobin, or reticulocyte levels in healthy individuals and selected patient populations. Examples of appropriate patient populations include those with undesirably low red blood cell or hemoglobin levels, such as patients having an anemia, and those that are at risk for developing undesirably low red blood cell or hemoglobin levels, such as those patients who are about to undergo major surgery or other procedures that may result in substantial blood loss. In one embodiment, a patient with adequate red blood cell levels is treated with a TGF-beta superfamily heteromultimer, or combinations of TGF-beta superfamily heteromultimers, to increase red blood cell levels, and then blood is drawn and stored for later use in transfusions.

[0717] One or more TGF-beta superfamily heteromultimers of the disclosure, optionally combined with an EPO receptor activator, may be used to increase red blood cell levels, hemoglobin levels, and/or hematocrit levels in a patient having an anemia. When observing hemoglobin and/or hematocrit levels in humans, a level of less than normal for the appropriate age and gender category may be indicative of anemia, although individual variations are taken into account. For example, a hemoglobin level from 10-12.5 g/dl, and typically about 11.0 g/dl is considered to be within the normal range in health adults, although, in terms of therapy, a lower target level may cause fewer cardiovascular side effects [see, e.g., Jacobs et al. (2000) Nephrol Dial Transplant 15, 15-19]. Alternatively, hematocrit levels (percentage of the volume of a blood sample occupied by the cells) can be used as a measure for anemia. Hematocrit levels for healthy individuals range from about 41-51% for adult males and from 35-45% for adult females. In certain embodiments, a patient may be treated with a dosing regimen intended to restore the patient to a target level of red blood cells, hemoglobin, and/or hematocrit. As hemoglobin and hematocrit levels vary from person to person, optimally, the target hemoglobin and/or hematocrit level can be individualized for each patient.

[0718] Anemia is frequently observed in patients having a tissue injury, an infection, and/or a chronic disease, particularly cancer. In some subjects, anemia is distinguished by low erythropoietin levels and/or an inadequate response to erythropoietin in the bone marrow [see, e.g., Adamson (2008) Harrison's Principles of Internal Medicine, 17th ed.; McGraw Hill, New York, pp 628-634]. Potential causes of anemia include, for example, blood loss, nutritional deficits (e.g. reduced dietary intake of protein), medication reaction, various problems associated with the bone marrow, and many diseases. More particularly, anemia has been associated with a variety of disorders and conditions that include, for example, bone marrow transplantation; solid tumors (e.g., breast cancer, lung cancer, and colon cancer); tumors of the lymphatic system (e.g., chronic lymphocyte leukemia, non-Hodgkins lymphoma, and Hodgkins lymphoma); tumors of the hematopoietic system (e.g., leukemia, a myelodysplastic syndrome and multiple myeloma); radiation therapy; chemotherapy (e.g., platinum containing regimens); inflammatory and autoimmune diseases, including, but not limited to, rheumatoid arthritis, other inflammatory arthritides, systemic lupus erythematosis (SLE), acute or chronic skin diseases (e.g., psoriasis), inflammatory bowel disease (e.g., Crohn's disease and ulcerative colitis); acute or chronic renal disease or failure, including idiopathic or congenital conditions; acute or chronic liver disease; acute or chronic bleeding; situations where transfusion of red blood cells is not possible due to patient allo- or auto-antibodies and/or for religious reasons (e.g., some Jehovah's Witnesses); infections (e.g., malaria and osteomyelitis); hemoglobinopathies including, for example, sickle cell disease (anemia), thalassemias; drug use or abuse (e.g., alcohol misuse); pediatric patients with anemia from any cause to avoid transfusion; and elderly patients or patients with underlying cardiopulmonary disease with anemia who cannot receive transfusions due to concerns about circulatory overload [see, e.g., Adamson (2008) Harrison's Principles of Internal Medicine, 17th ed.; McGraw Hill, New York, pp 628-634]. In some embodiments, one or more TGF-beta superfamily heteromultimers of the disclosure could be used to treat or prevent anemia associated with one or more of the disorders or conditions disclosed herein.

[0719] Many factors can contribute to cancer-related anemia. Some are associated with the disease process itself and the generation of inflammatory cytokines such as interleukin-1, interferon-gamma, and tumor necrosis factor [Bron et al. (2001) Semin Oncol 28(Suppl 8):1-6]. Among its effects, inflammation induces the key iron-regulatory peptide hepcidin, thereby inhibiting iron export from macrophages and generally limiting iron availability for erythropoiesis [see, e.g., Ganz (2007) J Am Soc Nephrol 18:394-400]. Blood loss through various routes can also contribute to cancer-related anemia. The prevalence of anemia due to cancer progression varies with cancer type, ranging from 5% in prostate cancer up to 90% in multiple myeloma. Cancer-related anemia has profound consequences for patients, including fatigue and reduced quality of life, reduced treatment efficacy, and increased mortality. In some embodiments, one or more TGF-beta superfamily heteromultimers of the disclosure, optionally combined with an EPO receptor activator, could be used to treat a cancer-related anemia.

[0720] A hypoproliferative anemia can result from primary dysfunction or failure of the bone marrow. Hypoproliferative anemias include: anemia of chronic disease, anemia associated with hypometabolic states, and anemia associated with cancer. In each of these types, endogenous erythropoietin levels are inappropriately low for the degree of anemia observed. Other hypoproliferative anemias include: early-stage iron-deficient anemia, and anemia caused by damage to the bone marrow. In these types, endogenous erythropoietin levels are appropriately elevated for the degree of anemia observed. Prominent examples would be myelosuppression caused by cancer and/or chemotherapeutic drugs or cancer radiation therapy. A broad review of clinical trials found that mild anemia can occur in 100% of patients after chemotherapy, while more severe anemia can occur in up to 80% of such patients [see, e.g., Groopman et al. (1999) J Natl Cancer Inst 91:1616-1634]. Myelosuppressive drugs include, for example: 1) alkylating agents such as nitrogen mustards (e.g., melphalan) and nitrosoureas (e.g., streptozocin); 2) antimetabolites such as folic acid antagonists (e.g., methotrexate), purine analogs (e.g., thioguanine), and pyrimidine analogs (e.g., gemcitabine); 3) cytotoxic antibiotics such as anthracyclines (e.g., doxorubicin); 4) kinase inhibitors (e.g., gefitinib); 5) mitotic inhibitors such as taxanes (e.g., paclitaxel) and vinca alkaloids (e.g., vinorelbine); 6) monoclonal antibodies (e.g., rituximab); and 7) topoisomerase inhibitors (e.g., topotecan and etoposide). In addition, conditions resulting in a hypometabolic rate can produce a mild-to-moderate hypoproliferative anemia. Among such conditions are endocrine deficiency states. For example, anemia can occur in Addison's disease, hypothyroidism, hyperparathyroidism, or males who are castrated or treated with estrogen. In some embodiments, one or more TGF-beta superfamily heteromultimers of the disclosure, optionally combined with an EPO receptor activator, could be used to treat a hyperproliferative anemia.

[0721] Anemia resulting from acute blood loss of sufficient volume, such as from trauma or postpartum hemorrhage, is known as acute post-hemorrhagic anemia. Acute blood loss initially causes hypovolemia without anemia since there is proportional depletion of RBCs along with other blood constituents. However, hypovolemia will rapidly trigger physiologic mechanisms that shift fluid from the extravascular to the vascular compartment, which results in hemodilution and anemia. If chronic, blood loss gradually depletes body iron stores and eventually leads to iron deficiency. In some embodiments, one or more TGF-beta superfamily heteromultimers of the disclosure, optionally combined with an EPO receptor activator, could be used to treat anemia resulting from acute blood loss.

[0722] Iron-deficiency anemia is the final stage in a graded progression of increasing iron deficiency which includes negative iron balance and iron-deficient erythropoiesis as intermediate stages. Iron deficiency can result from increased iron demand, decreased iron intake, or increased iron loss, as exemplified in conditions such as pregnancy, inadequate diet, intestinal malabsorption, acute or chronic inflammation, and acute or chronic blood loss. With mild-to-moderate anemia of this type, the bone marrow remains hypoproliferative, and RBC morphology is largely normal; however, even mild anemia can result in some microcytic hypochromic RBCs, and the transition to severe iron-deficient anemia is accompanied by hyperproliferation of the bone marrow and increasingly prevalent microcytic and hypochromic RBCs [see, e.g., Adamson (2008) Harrison's Principles of Internal Medicine, 17th ed.; McGraw Hill, New York, pp 628-634]. Appropriate therapy for iron-deficiency anemia depends on its cause and severity, with oral iron preparations, parenteral iron formulations, and RBC transfusion as major conventional options. In some embodiments, one or more TGF-beta superfamily heteromultimers of the disclosure, optionally combined with an EPO receptor activator, could be used to treat a chronic iron-deficiency.

[0723] Myelodysplastic syndrome (MDS) is a diverse collection of hematological conditions characterized by ineffective production of myeloid blood cells and risk of transformation to acute myelogenous leukemia. In MDS patients, blood stem cells do not mature into healthy red blood cells, white blood cells, or platelets. MDS disorders include, for example, refractory anemia, refractory anemia with ringed sideroblasts, refractory anemia with excess blasts, refractory anemia with excess blasts in transformation, refractory cytopenia with multilineage dysplasia, and myelodysplastic syndrome associated with an isolated 5q chromosome abnormality. As these disorders manifest as irreversible defects in both quantity and quality of hematopoietic cells, most MDS patients are afflicted with chronic anemia. Therefore, MDS patients eventually require blood transfusions and/or treatment with growth factors (e.g., erythropoietin or G-CSF) to increase red blood cell levels. However, many MDS patients develop side-effects due to frequency of such therapies. For example, patients who receive frequent red blood cell transfusion can exhibit tissue and organ damage from the buildup of extra iron. Accordingly, one or more TGF-beta superfamily heteromultimer complexes of the disclosure, may be used to treat patients having MDS. In certain embodiments, patients suffering from MDS may be treated using one or more TGF-beta superfamily heteromultimers of the disclosure, optionally in combination with an EPO receptor activator. In other embodiments, patients suffering from MDS may be treated using a combination of one or more TGF-beta superfamily heteromultimers of the disclosure and one or more additional therapeutic agents for treating MDS including, for example, thalidomide, lenalidomide, azacitadine, decitabine, erythropoietins, deferoxamine, antithymocyte globulin, and filgrastrim (G-CSF).

[0724] Originally distinguished from aplastic anemia, hemorrhage, or peripheral hemolysis on the basis of ferrokinetic studies [see, e.g., Ricketts et al. (1978) Clin Nucl Med 3:159-164], ineffective erythropoiesis describes a diverse group of anemias in which production of mature RBCs is less than would be expected given the number of erythroid precursors (erythroblasts) present in the bone marrow [Tanno et al. (2010) Adv Hematol 2010:358283]. In such anemias, tissue hypoxia persists despite elevated erythropoietin levels due to ineffective production of mature RBCs. A vicious cycle eventually develops in which elevated erythropoietin levels drive massive expansion of erythroblasts, potentially leading to splenomegaly (spleen enlargement) due to extramedullary erythropoiesis [see, e.g., Aizawa et al. (2003) Am J Hematol 74:68-72], erythroblast-induced bone pathology [see, e.g., Di Matteo et al. (2008) J Biol Regul Homeost Agents 22:211-216], and tissue iron overload, even in the absence of therapeutic RBC transfusions [see, e.g., Pippard et al. (1979) Lancet 2:819-821]. Thus, by boosting erythropoietic effectiveness, one or more TGF-beta superfamily heteromultimers of the present disclosure may break the aforementioned cycle and thus alleviate not only the underlying anemia but also the associated complications of elevated erythropoietin levels, splenomegaly, bone pathology, and tissue iron overload. In some embodiments, one or more TGF-beta superfamily heteromultimers of the present disclosure can be used to treat or prevent ineffective erythropoiesis, including anemia and elevated EPO levels as well as complications such as splenomegaly, erythroblast-induced bone pathology, iron overload, and their attendant pathologies. With splenomegaly, such pathologies include thoracic or abdominal pain and reticuloendothelial hyperplasia. Extramedullary hematopoiesis can occur not only in the spleen but potentially in other tissues in the form of extramedullary hematopoietic pseudotumors [see, e.g., Musallam et al. (2012) Cold Spring Harb Perspect Med 2:a013482]. With erythroblast-induced bone pathology, attendant pathologies include low bone mineral density, osteoporosis, and bone pain [see, e.g., Haidar et al. (2011) Bone 48:425-432]. With iron overload, attendant pathologies include hepcidin suppression and hyperabsorption of dietary iron [see, e.g., Musallam et al. (2012) Blood Rev 26(Suppl 1):516-519], multiple endocrinopathies and liver fibrosis/cirrhosis [see, e.g., Galanello et al. (2010) Orphanet J Rare Dis 5:11], and iron-overload cardiomyopathy [Lekawanvijit et al., 2009, Can J Cardiol 25:213-218].

[0725] The most common causes of ineffective erythropoiesis are the thalassemia syndromes, hereditary hemoglobinopathies in which imbalances in the production of intact alpha- and beta-hemoglobin chains lead to increased apoptosis during erythroblast maturation [see, e.g., Schrier (2002) Curr Opin Hematol 9:123-126]. Thalassemias are collectively among the most frequent genetic disorders worldwide, with changing epidemiologic patterns predicted to contribute to a growing public health problem in both the U.S. and globally [Vichinsky (2005) Ann NY Acad Sci 1054:18-24]. Thalassemia syndromes are named according to their severity. Thus, α-thalassemias include α-thalassemia minor (also known as α-thalassemia trait; two affected α-globin genes), hemoglobin H disease (three affected α-globin genes), and α-thalassemia major (also known as hydrops fetalis; four affected α-globin genes). β-Thalassemias include β-thalassemia minor (also known as β-thalassemia trait; one affected β-globin gene), β-thalassemia intermedia (two affected β-globin genes), hemoglobin E thalassemia (two affected β-globin genes), and β-thalassemia major (also known as Cooley's anemia; two affected β-globin genes resulting in a complete absence of β-globin protein). β-Thalassemia impacts multiple organs, is associated with considerable morbidity and mortality, and currently requires life-long care. Although life expectancy in patients with β-thalassemia has increased in recent years due to use of regular blood transfusions in combination with iron chelation, iron overload resulting both from transfusions and from excessive gastrointestinal absorption of iron can cause serious complications such as heart disease, thrombosis, hypogonadism, hypothyroidism, diabetes, osteoporosis, and osteopenia [see, e.g., Rund et al. (2005) N Engl J Med 353:1135-1146]. In certain embodiments, one or more TGF-beta superfamily heteromultimers of the disclosure, optionally combined with an EPO receptor activator, can be used to treat or prevent a thalassemia syndrome.

[0726] In some embodiments, one or more TGF-beta superfamily heteromultimers of the disclosure, optionally combined with an EPO receptor activator, can be used for treating disorders of ineffective erythropoiesis besides thalassemia syndromes. Such disorders include siderblastic anemia (inherited or acquired); dyserythropoietic anemia (types I and II); sickle cell anemia; hereditary spherocytosis; pyruvate kinase deficiency; megaloblastic anemias, potentially caused by conditions such as folate deficiency (due to congenital diseases, decreased intake, or increased requirements), cobalamin deficiency (due to congenital diseases, pernicious anemia, impaired absorption, pancreatic insufficiency, or decreased intake), certain drugs, or unexplained causes (congenital dyserythropoietic anemia, refractory megaloblastic anemia, or erythroleukemia); myelophthisic anemias including; congenital erythropoietic porphyria; and lead poisoning.

[0727] In certain embodiments, one or more TGF-beta superfamily heteromultimers of the disclosure may be used in combination with supportive therapies for ineffective erythropoiesis. Such therapies include transfusion with either red blood cells or whole blood to treat anemia. In chronic or hereditary anemias, normal mechanisms for iron homeostasis are overwhelmed by repeated transfusions, eventually leading to toxic and potentially fatal accumulation of iron in vital tissues such as heart, liver, and endocrine glands. Thus, supportive therapies for patients chronically afflicted with ineffective erythropoiesis also include treatment with one or more iron-chelating molecules to promote iron excretion in the urine and/or stool and thereby prevent, or reverse, tissue iron overload [see, e.g., Hershko (2006) Haematologica 91:1307-1312; Cao et al. (2011), Pediatr Rep 3(2):e17]. Effective iron-chelating agents should be able to selectively bind and neutralize ferric iron, the oxidized form of non-transferrin bound iron which likely accounts for most iron toxicity through catalytic production of hydroxyl radicals and oxidation products [see, e.g., Esposito et al. (2003) Blood 102:2670-2677]. These agents are structurally diverse, but all possess oxygen or nitrogen donor atoms able to form neutralizing octahedral coordination complexes with individual iron atoms in stoichiometries of 1:1 (hexadentate agents), 2:1 (tridentate), or 3:1 (bidentate) [Kalinowski et al. (2005) Pharmacol Rev 57:547-583]. In general, effective iron-chelating agents also are relatively low molecular weight (e.g., less than 700 daltons), with solubility in both water and lipids to enable access to affected tissues. Specific examples of iron-chelating molecules include deferoxamine, a hexadentate agent of bacterial origin requiring daily parenteral administration, and the orally active synthetic agents deferiprone (bidentate) and deferasirox (tridentate). Combination therapy consisting of same-day administration of two iron-chelating agents shows promise in patients unresponsive to chelation monotherapy and also in overcoming issues of poor patient compliance with dereroxamine alone [Cao et al. (2011) Pediatr Rep 3(2):e17; Galanello et al. (2010) Ann NY Acad Sci 1202:79-86].

[0728] As used herein, “combination”, “in combination with” or “conjoint administration” refers to any form of administration such that the second therapy is still effective in the body (e.g., the two compounds are simultaneously effective in the patient, which may include synergistic effects of the two compounds). Effectiveness may not correlate to measurable concentration of the agent in blood, serum, or plasma. For example, the different therapeutic compounds can be administered either in the same formulation or in separate formulations, either concomitantly or sequentially, and on different schedules. Thus, an individual who receives such treatment can benefit from a combined effect of different therapies. One or more TGF-beta superfamily heteromultimers of the disclosure can be administered concurrently with, prior to, or subsequent to, one or more other additional agents or supportive therapies. In general, each therapeutic agent will be administered at a dose and/or on a time schedule determined for that particular agent. The particular combination to employ in a regimen will take into account compatibility of the antagonist of the present disclosure with the therapy and/or the desired therapeutic effect to be achieved.

[0729] In certain embodiments, one or more TGF-beta superfamily heteromultimers of the disclosure may be used in combination with hepcidin or a hepcidin agonist for ineffective erythropoiesis. A circulating polypeptide produced mainly in the liver, hepcidin is considered a master regulator of iron metabolism by virtue of its ability to induce the degradation of ferroportin, an iron-export protein localized on absorptive enterocytes, hepatocytes, and macrophages. Broadly speaking, hepcidin reduces availability of extracellular iron, so hepcidin agonists may be beneficial in the treatment of ineffective erythropoiesis [see, e.g., Nemeth (2010) Adv Hematol 2010:750643]. This view is supported by beneficial effects of increased hepcidin expression in a mouse model of β-thalassemia [Gardenghi et al. (2010) J Clin Invest 120:4466-4477].

[0730] One or more TGF-beta superfamily heteromultimers of the disclosure, optionally combined with an EPO receptor activator, would also be appropriate for treating anemias of disordered RBC maturation, which are characterized in part by undersized (microcytic), oversized (macrocytic), misshapen, or abnormally colored (hypochromic) RBCs.

[0731] In certain embodiments, the present disclosure provides methods of treating or preventing anemia in an individual in need thereof by administering to the individual a therapeutically effective amount of one or more TGF-beta superfamily heteromultimers of the disclosure and an EPO receptor activator. In certain embodiments, one or more TGF-beta superfamily heteromultimers of the disclosure may be used in combination with EPO receptor activators to reduce the required dose of these activators in patients that are susceptible to adverse effects of EPO. These methods may be used for therapeutic and prophylactic treatments of a patient.

[0732] One or more TGF-beta superfamily heteromultimers of the disclosure may be used in combination with EPO receptor activators to achieve an increase in red blood cells, particularly at lower dose ranges of EPO receptor activators. This may be beneficial in reducing the known off-target effects and risks associated with high doses of EPO receptor activators. The primary adverse effects of EPO include, for example, an excessive increase in the hematocrit or hemoglobin levels and polycythemia. Elevated hematocrit levels can lead to hypertension (more particularly aggravation of hypertension) and vascular thrombosis. Other adverse effects of EPO which have been reported, some of which relate to hypertension, are headaches, influenza-like syndrome, obstruction of shunts, myocardial infarctions and cerebral convulsions due to thrombosis, hypertensive encephalopathy, and red cell blood cell aplasia. See, e.g., Singibarti (1994) J. Clin Investig 72(suppl 6), S36-S43; Horl et al. (2000) Nephrol Dial Transplant 15(suppl 4), 51-56; Delanty et al. (1997) Neurology 49, 686-689; and Bunn (2002) N Engl J Med 346(7), 522-523).

[0733] Provided that TGF-beta superfamily heteromultimers of the present disclosure act by a different mechanism than EPO, these antagonists may be useful for increasing red blood cell and hemoglobin levels in patients that do not respond well to EPO. For example, a TGF-beta superfamily heteromultimer of the present disclosure may be beneficial for a patient in which administration of a normal-to-increased dose of EPO (>300 IU/kg/week) does not result in the increase of hemoglobin level up to the target level. Patients with an inadequate EPO response are found in all types of anemia, but higher numbers of non-responders have been observed particularly frequently in patients with cancers and patients with end-stage renal disease. An inadequate response to EPO can be either constitutive (observed upon the first treatment with EPO) or acquired (observed upon repeated treatment with EPO).

[0734] In certain embodiments, the present disclosure provides methods for managing a patient that has been treated with, or is a candidate to be treated with, one or more TGF-beta superfamily heteromultimers of the disclosure by measuring one or more hematologic parameters in the patient. The hematologic parameters may be used to evaluate appropriate dosing for a patient who is a candidate to be treated with the antagonist of the present disclosure, to monitor the hematologic parameters during treatment, to evaluate whether to adjust the dosage during treatment with one or more antagonist of the disclosure, and/or to evaluate an appropriate maintenance dose of one or more antagonists of the disclosure. If one or more of the hematologic parameters are outside the normal level, dosing with one or more TGF-beta superfamily heteromultimers of the disclosure may be reduced, delayed or terminated.

[0735] Hematologic parameters that may be measured in accordance with the methods provided herein include, for example, red blood cell levels, blood pressure, iron stores, and other agents found in bodily fluids that correlate with increased red blood cell levels, using art-recognized methods. Such parameters may be determined using a blood sample from a patient. Increases in red blood cell levels, hemoglobin levels, and/or hematocrit levels may cause increases in blood pressure.

[0736] In one embodiment, if one or more hematologic parameters are outside the normal range or on the high side of normal in a patient who is a candidate to be treated with one or more TGF-beta superfamily heteromultimers of the disclosure, then onset of administration of the one or more TGF-beta superfamily heteromultimers of the disclosure may be delayed until the hematologic parameters have returned to a normal or acceptable level either naturally or via therapeutic intervention. For example, if a candidate patient is hypertensive or pre-hypertensive, then the patient may be treated with a blood pressure lowering agent in order to reduce the patient's blood pressure. Any blood pressure lowering agent appropriate for the individual patient's condition may be used including, for example, diuretics, adrenergic inhibitors (including alpha blockers and beta blockers), vasodilators, calcium channel blockers, angiotensin-converting enzyme (ACE) inhibitors, or angiotensin II receptor blockers. Blood pressure may alternatively be treated using a diet and exercise regimen. Similarly, if a candidate patient has iron stores that are lower than normal, or on the low side of normal, then the patient may be treated with an appropriate regimen of diet and/or iron supplements until the patient's iron stores have returned to a normal or acceptable level. For patients having higher than normal red blood cell levels and/or hemoglobin levels, then administration of the one or more TGF-beta superfamily heteromultimers of the disclosure may be delayed until the levels have returned to a normal or acceptable level.

[0737] In certain embodiments, if one or more hematologic parameters are outside the normal range or on the high side of normal in a patient who is a candidate to be treated with one or more TGF-beta superfamily heteromultimers of the disclosure, then the onset of administration may not be delayed. However, the dosage amount or frequency of dosing of the one or more TGF-beta superfamily heteromultimers of the disclosure may be set at an amount that would reduce the risk of an unacceptable increase in the hematologic parameters arising upon administration of the one or more TGF-beta superfamily heteromultimers of the disclosure. Alternatively, a therapeutic regimen may be developed for the patient that combines one or more TGF-beta superfamily heteromultimers of the disclosure with a therapeutic agent that addresses the undesirable level of the hematologic parameter. For example, if the patient has elevated blood pressure, then a therapeutic regimen involving administration of one or more TGF-beta superfamily heteromultimers of the disclosure and a blood pressure-lowering agent may be designed. For a patient having lower than desired iron stores, a therapeutic regimen of one or more TGF-beta superfamily heteromultimers of the disclosure and iron supplementation may be developed.

[0738] In one embodiment, baseline parameter(s) for one or more hematologic parameters may be established for a patient who is a candidate to be treated with one or more TGF-beta superfamily heteromultimers of the disclosure and an appropriate dosing regimen established for that patient based on the baseline value(s). Alternatively, established baseline parameters based on a patient's medical history could be used to inform an appropriate dosing regimen for a patient. For example, if a healthy patient has an established baseline blood pressure reading that is above the defined normal range it may not be necessary to bring the patient's blood pressure into the range that is considered normal for the general population prior to treatment with the one or more TGF-beta superfamily heteromultimers of the disclosure. A patient's baseline values for one or more hematologic parameters prior to treatment with one or more TGF-beta superfamily heteromultimers of the disclosure may also be used as the relevant comparative values for monitoring any changes to the hematologic parameters during treatment with the one or more TGF-beta superfamily heteromultimers of the disclosure.

[0739] In certain embodiments, one or more hematologic parameters are measured in patients who are being treated with a one or more TGF-beta superfamily heteromultimers of the disclosure. The hematologic parameters may be used to monitor the patient during treatment and permit adjustment or termination of the dosing with the one or more TGF-beta superfamily heteromultimers of the disclosure or additional dosing with another therapeutic agent. For example, if administration of one or more TGF-beta superfamily heteromultimer complexes of the disclosure of the disclosure results in an increase in blood pressure, red blood cell level, or hemoglobin level, or a reduction in iron stores, then the dose of the one or more TGF-beta superfamily heteromultimers of the disclosure may be reduced in amount or frequency in order to decrease the effects of the one or more TGF-beta superfamily heteromultimers of the disclosure on the one or more hematologic parameters. If administration of one or more TGF-beta superfamily heteromultimers of the disclosure results in a change in one or more hematologic parameters that is adverse to the patient, then the dosing of the one or more TGF-beta superfamily heteromultimers of the disclosure may be terminated either temporarily, until the hematologic parameter(s) return to an acceptable level, or permanently. Similarly, if one or more hematologic parameters are not brought within an acceptable range after reducing the dose or frequency of administration of the one or more TGF-beta superfamily heteromultimers of the disclosure, then the dosing may be terminated. As an alternative, or in addition to, reducing or terminating the dosing with the one or more TGF-beta superfamily heteromultimers of the disclosure, the patient may be dosed with an additional therapeutic agent that addresses the undesirable level in the hematologic parameter(s), such as, for example, a blood pressure-lowering agent or an iron supplement. For example, if a patient being treated with one or more TGF-beta superfamily heteromultimers of the disclosure has elevated blood pressure, then dosing with the one or more TGF-beta superfamily heteromultimers of the disclosure may continue at the same level and a blood pressure-lowering agent is added to the treatment regimen, dosing with the one or more TGF-beta superfamily heteromultimers of the disclosure may be reduced (e.g., in amount and/or frequency) and a blood pressure-lowering agent is added to the treatment regimen, or dosing with the one or more TGF-beta superfamily heteromultimers of the disclosure may be terminated and the patient may be treated with a blood pressure-lowering agent.

### 6. Pharmaceutical Compositions

[0740] In certain aspects, TGF-beta superfamily heteromultimers (e.g., TGF-beta superfamily co-receptor heteromultimers) of the present disclosure can be administered alone or as a component of a pharmaceutical formulation (also referred to as a therapeutic composition or pharmaceutical composition). A pharmaceutical formation refers to a preparation which is in such form as to permit the biological activity of an active ingredient (e.g., an agent of the present disclosure) contained therein to be effective and which contains no additional components which are unacceptably toxic to a subject to which the formulation would be administered. The subject compounds may be formulated for administration in any convenient way for use in human or veterinary medicine. For example, one or more agents of the present disclosure may be formulated with a pharmaceutically acceptable carrier. A pharmaceutically acceptable carrier refers to an ingredient in a pharmaceutical formulation, other than an active ingredient, which is generally nontoxic to a subject. A pharmaceutically acceptable carrier includes, but is not limited to, a buffer, excipient, stabilizer, and/or preservative. In some embodiments, pharmaceutical formulations for use in the present disclosure are in a pyrogen-free, physiologically-acceptable form when administered to a subject. Therapeutically useful agents other than those described herein, which may optionally be included in the formulation as described above, may be administered in combination with the subject agents in the methods of the present disclosure.

[0741] In certain embodiments, compositions will be administered parenterally [e.g., by intravenous (I.V.) injection, intraarterial injection, intraosseous injection, intramuscular injection, intrathecal injection, subcutaneous injection, or intradermal injection]. Pharmaceutical compositions suitable for parenteral administration may comprise one or more agents of the disclosure in combination with one or more pharmaceutically acceptable sterile isotonic aqueous or nonaqueous solutions, dispersions, suspensions or emulsions, or sterile powders which may be reconstituted into sterile injectable solutions or dispersions just prior to use. Injectable solutions or dispersions may contain antioxidants, buffers, bacteriostats, suspending agents, thickening agents, or solutes which render the formulation isotonic with the blood of the intended recipient. Examples of suitable aqueous and nonaqueous carriers which may be employed in the pharmaceutical formulations of the present disclosure include water, ethanol, polyols (e.g., glycerol, propylene glycol, polyethylene glycol, etc.), vegetable oils (e.g., olive oil), injectable organic esters (e.g., ethyl oleate), and suitable mixtures thereof. Proper fluidity can be maintained, for example, by the use of coating materials (e.g., lecithin), by the maintenance of the required particle size in the case of dispersions, and by the use of surfactants.

[0742] In some embodiments, a therapeutic method of the present disclosure includes administering the pharmaceutical composition systemically, or locally, from an implant or device. Further, the pharmaceutical composition may be encapsulated or injected in a form for delivery to a target tissue site (e.g., bone marrow or muscle). In certain embodiments, compositions of the present disclosure may include a matrix capable of delivering one or more of the agents of the present disclosure to a target tissue site (e.g., bone marrow or muscle), providing a structure for the developing tissue and optimally capable of being resorbed into the body. For example, the matrix may provide slow release of one or more agents of the present disclosure. Such matrices may be formed of materials presently in use for other implanted medical applications.

[0743] The choice of matrix material may be based on one or more of: biocompatibility, biodegradability, mechanical properties, cosmetic appearance, and interface properties. The particular application of the subject compositions will define the appropriate formulation. Potential matrices for the compositions may be biodegradable and chemically defined calcium sulfate, tricalciumphosphate, hydroxyapatite, polylactic acid, and polyanhydrides. Other potential materials are biodegradable and biologically well-defined including, for example, bone or dermal collagen. Further matrices are comprised of pure proteins or extracellular matrix components. Other potential matrices are non-biodegradable and chemically defined including, for example, sintered hydroxyapatite, bioglass, aluminates, or other ceramics. Matrices may be comprised of combinations of any of the above mentioned types of material including, for example, polylactic acid and hydroxyapatite or collagen and tricalciumphosphate. The bioceramics may be altered in composition (e.g., calcium-aluminate-phosphate) and processing to alter one or more of pore size, particle size, particle shape, and biodegradability.

[0744] In certain embodiments, pharmaceutical compositions of present disclosure can be administered topically. “Topical application” or “topically” means contact of the pharmaceutical composition with body surfaces including, for example, the skin, wound sites, and mucous membranes. The topical pharmaceutical compositions can have various application forms and typically comprises a drug-containing layer, which is adapted to be placed near to or in direct contact with the tissue upon topically administering the composition. Pharmaceutical compositions suitable for topical administration may comprise one or more one or more TGFβ superfamily heteromultimers of the disclosure in combination formulated as a liquid, a gel, a cream, a lotion, an ointment, a foam, a paste, a putty, a semi-solid, or a solid. Compositions in the liquid, gel, cream, lotion, ointment, foam, paste, or putty form can be applied by spreading, spraying, smearing, dabbing or rolling the composition on the target tissue. The compositions also may be impregnated into sterile dressings, transdermal patches, plasters, and bandages. Compositions of the putty, semi-solid or solid forms may be deformable. They may be elastic or non-elastic (e.g., flexible or rigid). In certain aspects, the composition forms part of a composite and can include fibers, particulates, or multiple layers with the same or different compositions.

[0745] Topical compositions in the liquid form may include pharmaceutically acceptable solutions, emulsions, microemulsions, and suspensions. In addition to the active ingredient(s), the liquid dosage form may contain an inert diluent commonly used in the art including, for example, water or other solvent, a solubilizing agent and/or emulsifier [e.g., ethyl alcohol, isopropyl alcohol, ethyl carbonate, ethyl acetate, benzyl alcohol, benzyl benzoate, propylene glycol, or 1,3-butylene glycol, an oil (e.g., cottonseed, groundnut, corn, germ, olive, castor, and sesame oil), glycerol, tetrahydrofuryl alcohol, a polyethylene glycol, a fatty acid ester of sorbitan, and mixtures thereof].

[0746] Topical gel, cream, lotion, ointment, semi-solid or solid compositions may include one or more thickening agents, such as a polysaccharide, synthetic polymer or protein-based polymer. In one embodiment of the invention, the gelling agent herein is one that is suitably nontoxic and gives the desired viscosity. The thickening agents may include polymers, copolymers, and monomers of: vinylpyrrolidones, methacrylamides, acrylamides N-vinylimidazoles, carboxy vinyls, vinyl esters, vinyl ethers, silicones, polyethyleneoxides, polyethyleneglycols, vinylalcohols, sodium acrylates, acrylates, maleic acids, NN-dimethylacrylamides, diacetone acrylamides, acrylamides, acryloyl morpholine, pluronic, collagens, polyacrylamides, polyacrylates, polyvinyl alcohols, polyvinylenes, polyvinyl silicates, polyacrylates substituted with a sugar (e.g., sucrose, glucose, glucosamines, galactose, trehalose, mannose, or lactose), acylamidopropane sulfonic acids, tetramethoxyorthosilicates, methyltrimethoxyorthosilicates, tetraalkoxyorthosilicates, trialkoxyorthosilicates, glycols, propylene glycol, glycerine, polysaccharides, alginates, dextrans, cyclodextrin, celluloses, modified celluloses, oxidized celluloses, chitosans, chitins, guars, carrageenans, hyaluronic acids, inulin, starches, modified starches, agarose, methylcelluloses, plant gums, hylaronans, hydrogels, gelatins, glycosaminoglycans, carboxymethyl celluloses, hydroxyethyl celluloses, hydroxy propyl methyl celluloses, pectins, low-methoxy pectins, cross-linked dextrans, starch-acrylonitrile graft copolymers, starch sodium polyacrylate, hydroxyethyl methacrylates, hydroxyl ethyl acrylates, polyvinylene, polyethylvinylethers, polymethyl methacrylates, polystyrenes, polyurethanes, polyalkanoates, polylactic acids, polylactates, poly(3-hydroxybutyrate), sulfonated hydrogels, AMPS (2-acrylamido-2-methyl-1-propanesulfonic acid), SEM (sulfoethylmethacrylate), SPM (sulfopropyl methacrylate), SPA (sulfopropyl acrylate), N,N-dimethyl-N-methacryloxyethyl-N-(3-sulfopropyl)ammonium betaine, methacryllic acid amidopropyl-dimethyl ammonium sulfobetaine, SPI (itaconic acid-bis(1-propyl sulfonizacid-3) ester di-potassium salt), itaconic acids, AMBC (3-acrylamido-3-methylbutanoic acid), beta-carboxyethyl acrylate (acrylic acid dimers), and maleic anhydride-methylvinyl ether polymers, derivatives thereof, salts thereof, acids thereof, and combinations thereof. In certain embodiments, pharmaceutical compositions of present disclosure can be administered orally, for example, in the form of capsules, cachets, pills, tablets, lozenges (using a flavored basis such as sucrose and acacia or tragacanth), powders, granules, a solution or a suspension in an aqueous or non-aqueous liquid, an oil-in-water or water-in-oil liquid emulsion, or an elixir or syrup, or pastille (using an inert base, such as gelatin and glycerin, or sucrose and acacia), and/or a mouth wash, each containing a predetermined amount of a compound of the present disclosure and optionally one or more other active ingredients. A compound of the present disclosure and optionally one or more other active ingredients may also be administered as a bolus, electuary, or paste.

[0747] In solid dosage forms for oral administration (e.g., capsules, tablets, pills, dragees, powders, and granules), one or more compounds of the present disclosure may be mixed with one or more pharmaceutically acceptable carriers including, for example, sodium citrate, dicalcium phosphate, a filler or extender (e.g., a starch, lactose, sucrose, glucose, mannitol, and silicic acid), a binder (e.g. carboxymethylcellulose, an alginate, gelatin, polyvinyl pyrrolidone, sucrose, and acacia), a humectant (e.g., glycerol), a disintegrating agent (e.g., agar-agar, calcium carbonate, potato or tapioca starch, alginic acid, a silicate, and sodium carbonate), a solution retarding agent (e.g. paraffin), an absorption accelerator (e.g. a quaternary ammonium compound), a wetting agent (e.g., cetyl alcohol and glycerol monostearate), an absorbent (e.g., kaolin and bentonite clay), a lubricant (e.g., a talc, calcium stearate, magnesium stearate, solid polyethylene glycols, sodium lauryl sulfate), a coloring agent, and mixtures thereof. In the case of capsules, tablets, and pills, the pharmaceutical formulation (composition) may also comprise a buffering agent. Solid compositions of a similar type may also be employed as fillers in soft and hard-filled gelatin capsules using one or more excipients including, e.g., lactose or a milk sugar as well as a high molecular-weight polyethylene glycol.

[0748] Liquid dosage forms for oral administration of the pharmaceutical composition may include pharmaceutically acceptable emulsions, microemulsions, solutions, suspensions, syrups, and elixirs. In addition to the active ingredient(s), the liquid dosage form may contain an inert diluent commonly used in the art including, for example, water or other solvent, a solubilizing agent and/or emulsifier [e.g., ethyl alcohol, isopropyl alcohol, ethyl carbonate, ethyl acetate, benzyl alcohol, benzyl benzoate, propylene glycol, or 1,3-butylene glycol, an oil (e.g., cottonseed, groundnut, corn, germ, olive, castor, and sesame oil), glycerol, tetrahydrofuryl alcohol, a polyethylene glycol, a fatty acid ester of sorbitan, and mixtures thereof]. Besides inert diluents, the oral formulation can also include an adjuvant including, for example, a wetting agent, an emulsifying and suspending agent, a sweetening agent, a flavoring agent, a coloring agent, a perfuming agent, a preservative agent, and combinations thereof.

[0749] Suspensions, in addition to the active compounds, may contain suspending agents including, for example, an ethoxylated isostearyl alcohol, polyoxyethylene sorbitol, a sorbitan ester, microcrystalline cellulose, aluminum metahydroxide, bentonite, agar-agar, tragacanth, and combinations thereof.

[0750] Prevention of the action and/or growth of microorganisms may be ensured by the inclusion of various antibacterial and antifungal agents including, for example, paraben, chlorobutanol, and phenol sorbic acid.

[0751] In certain embodiments, it may be desirable to include an isotonic agent including, for example, a sugar or sodium chloride into the compositions. In addition, prolonged absorption of an injectable pharmaceutical form may be brought about by the inclusion of an agent that delay absorption including, for example, aluminum monostearate and gelatin.

[0752] It is understood that the dosage regimen will be determined by the attending physician considering various factors which modify the action of the one or more of the agents of the present disclosure. In the case of a TGF-beta superfamily heteromultimer that promotes red blood cell formation, various factors may include, but are not limited to, the patient's red blood cell count, hemoglobin level, the desired target red blood cell count, the patient's age, the patient's sex, the patient's diet, the severity of any disease that may be contributing to a depressed red blood cell level, the time of administration, and other clinical factors. The addition of other known active agents to the final composition may also affect the dosage. Progress can be monitored by periodic assessment of one or more of red blood cell levels, hemoglobin levels, reticulocyte levels, and other indicators of the hematopoietic process.

[0753] In certain embodiments, the present disclosure also provides gene therapy for the in vivo production of one or more of the agents of the present disclosure. Such therapy would achieve its therapeutic effect by introduction of the agent sequences into cells or tissues having one or more of the disorders as listed above. Delivery of the agent sequences can be achieved, for example, by using a recombinant expression vector such as a chimeric virus or a colloidal dispersion system. Preferred therapeutic delivery of one or more of agent sequences of the disclosure is the use of targeted liposomes.

[0754] Various viral vectors which can be utilized for gene therapy as taught herein include adenovirus, herpes virus, vaccinia, or an RNA virus (e.g., a retrovirus). The retroviral vector may be a derivative of a murine or avian retrovirus. Examples of retroviral vectors in which a single foreign gene can be inserted include, but are not limited to: Moloney murine leukemia virus (MoMuLV), Harvey murine sarcoma virus (HaMuSV), murine mammary tumor virus (MuMTV), and Rous Sarcoma Virus (RSV). A number of additional retroviral vectors can incorporate multiple genes. All of these vectors can transfer or incorporate a gene for a selectable marker so that transduced cells can be identified and generated. Retroviral vectors can be made target-specific by attaching, for example, a sugar, a glycolipid, or a protein. Preferred targeting is accomplished by using an antibody. Those of skill in the art will recognize that specific polynucleotide sequences can be inserted into the retroviral genome or attached to a viral envelope to allow target specific delivery of the retroviral vector containing one or more of the agents of the present disclosure.

[0755] Alternatively, tissue culture cells can be directly transfected with plasmids encoding the retroviral structural genes (gag, pol, and env), by conventional calcium phosphate transfection. These cells are then transfected with the vector plasmid containing the genes of interest. The resulting cells release the retroviral vector into the culture medium.

[0756] Another targeted delivery system for one or more of the agents of the present disclosure is a colloidal dispersion system. Colloidal dispersion systems include, for example, macromolecule complexes, nanocapsules, microspheres, beads, and lipid-based systems including oil-in-water emulsions, micelles, mixed micelles, and liposomes. In certain embodiments, the preferred colloidal system of this disclosure is a liposome. Liposomes are artificial membrane vesicles which are useful as delivery vehicles in vitro and in vivo. RNA, DNA, and intact virions can be encapsulated within the aqueous interior and be delivered to cells in a biologically active form. See, e.g., Fraley, et al. (1981) Trends Biochem. Sci., 6:77. Methods for efficient gene transfer using a liposome vehicle are known in the art. See, e.g., Mannino, et al. (1988) Biotechniques, 6:682, 1988.

[0757] The composition of the liposome is usually a combination of phospholipids, which may include a steroid (e.g. cholesterol). The physical characteristics of liposomes depend on pH, ionic strength, and the presence of divalent cations. Other phospholipids or other lipids may also be used including, for example a phosphatidyl compound (e.g., phosphatidylglycerol, phosphatidylcholine, phosphatidylserine, phosphatidylethanolamine, a sphingolipid, a cerebroside, and a ganglioside), egg phosphatidylcholine, dipalmitoylphosphatidylcholine, and distearoylphosphatidylcholine. The targeting of liposomes is also possible based on, for example, organ-specificity, cell-specificity, and organelle-specificity and is known in the art.

### EXEMPLIFICATION

[0758] The invention now being generally described, it will be more readily understood by reference to the following examples, which are included merely for purposes of illustration of certain embodiments and embodiments of the present invention, and are not intended to limit the invention.

### Example 1. Generation of an ENG-Fc:ALK1-Fc Heterodimer

[0759] A soluble ENG-Fc:ALK1-Fc heteromultimer can be generated comprising a C-terminally truncated extracellular domain of human endoglin (ENG) and the extracellular domain of human ALK1, which are each fused to an Fc domain with a linker positioned between the extracellular domain and the Fc domain. The individual constructs are referred to as ENG(26-346)-Fc and ALK1-Fc fusion proteins, respectively. Other ENG-Fc constructs known in the art could similarly be used to generate ENG-Fc:ALK1-Fc heteromultimers. See, e.g., U.S. Ser. Nos. 14/112,620 and 14/522,891, the contents thereof are incorporated herein in their entirety.

[0760] A methodology for promoting formation of ENG-Fc:ALK1-Fc heteromultimers, as opposed to ENG-Fc or ALK1-Fc homomultimers, is to introduce alterations in the amino acid sequence of the Fc domains to guide the formation of asymmetric heteromultimers. Many different approaches to making asymmetric interaction pairs using Fc domains are described in this disclosure.

[0761] In one approach, illustrated in the ENG-Fc and ALK1-Fc polypeptide sequences of SEQ ID NOs: 101-103 and 104-106, respectively, one Fc domain is altered to introduce cationic amino acids at the interaction face, while the other Fc domain is altered to introduce anionic amino acids at the interaction face. The ENG(26-346)-Fc fusion polypeptide and ALK1-Fc fusion polypeptide each employ the tissue plasminogen activator (TPA) leader:

(SEQ ID NO: 100)

MDAMKRGLCCVLLLCGAVFVSP.

[0762] The ENG(26-346)-Fc polypeptide sequence (SEQ ID NO: 101) is shown below:

| (SEQ ID NO: 101) | |
|---|---|
| 1 | MDAMKRGLCC VLLLCGAVFV SPGAETVHCD LQPVGPERDE VTYTTSQVSK |
| 51 | GCVAQAPNAI LEVHVLFLEF PTGPSQLELT LQASKQNGTW PREVLLVLSV |
| 101 | NSSVFLHLQA LGIPLHLAYN SSLVTFQEPP GVNTTELPSF PKTQILEWAA |
| 151 | ERGPITSAAE LNDPQSILLR LGQAQGSLSF CMLEASQDMG RTLEWRPRTP |
| 201 | ALVRGCHLEG VAGHKEAHIL RVLPGHSAGP RTVTVKVELS CAPGDLDAVL |
| 251 | ILQGPPYVSW LIDANHNMQI WTTGEYSFKI FPEKNIRGFK LPDTPQGLLG |
| 301 | EARMLNASIV ASFVELPLAS IVSLHASSCG GRLQTSPAPI QTTPPTGGGT |
| 351 | HTCPPCPAPE LLGGPSVFLF PPKPKDTLMI SRTPEVTCVV VDVSHEDPEV |
| 401 | KFNWYVDGVE VHNAKTKPRE EQYNSTYRVV SVLTVLHQDW LNGKEYKCKV |
| 451 | SNKALPAPIE KTISKAKGQP REPQVYTLPP SRKEMTKNQV SLTCLVKGFY |
| 501 | PSDIAVEWES NGQPENNYKT TPPVLKSDGS FFLYSKLTVD KSRWQQGNVF |
| 551 | SCSVMHEALH NHYTQKSLSL SPGK |

[0763] The leader sequence and linker sequence are underlined. To promote formation of the ENG(26-346)-Fc:ALK1-Fc heterodimer rather than either of the possible homodimeric complexes, two amino acid substitutions (replacing acidic amino acids with lysine) can be introduced into the Fc domain of the ENG(26-346)-Fc fusion protein as indicated by double underline above. The amino acid sequence of SEQ ID NO: 101 may optionally be provided with the lysine removed from the C-terminus.

[0764] This ENG(26-346)-Fc fusion protein is encoded by the following nucleic acid sequence (SEQ ID NO: 102):

| (SEQ ID NO: 102) | |
|---|---|
| 1 | ATGGATGCAA TGAAGAGAGG GCTCTGCTGT GTGCTGCTGC TGTGTGGAGC |
| 51 | AGTCTTCGTT TCGCCCGGCG CCGAAACAGT CCATTGTGAC CTTCAGCCTG |
| 101 | TGGGCCCCGA GAGGGACGAG GTGACATATA CCACTAGCCA GGTCTCGAAG |
| 151 | GGCTGCGTGG CTCAGGCCCC CAATGCCATC CTTGAAGTCC ATGTCCTCTT |
| 201 | CCTGGAGTTC CCAACGGGCC CGTCACAGCT GGAGCTGACT CTCCAGGCAT |
| 251 | CCAAGCAAAA TGGCACCTGG CCCCGAGAGG TGCTTCTGGT CCTCAGTGTA |
| 301 | AACAGCAGTG TCTTCCTGCA TCTCCAGGCC CTGGGAATCC CACTGCACTT |
| 351 | GGCCTACAAT TCCAGCCTGG TCACCTTCCA AGAGCCCCCG GGGGTCAACA |
| 401 | CCACAGAGCT GCCATCCTTC CCCAAGACCC AGATCCTTGA GTGGGCAGCT |
| 451 | GAGAGGGGCC CCATCACCTC TGCTGCTGAG CTGAATGACC CCCAGAGCAT |
| 501 | CCTCCTCCGA CTGGGCCAAG CCCAGGGGTC ACTGTCCTTC TGCATGCTGG |
| 551 | AAGCCAGCCA GGACATGGGC CGCACGCTCG AGTGGCGGCC GCGTACTCCA |
| 601 | GCCTTGGTCC GGGGCTGCCA CTTGGAAGGC GTGGCCGGCC ACAAGGAGGC |
| 651 | GCACATCCTG AGGGTCCTGC CGGGCCACTC GGCCGGGCCC CGGACGGTGA |
| 701 | CGGTGAAGGT GGAACTGAGC TGCGCACCCG GGGATCTCGA TGCCGTCCTC |
| 751 | ATCCTGCAGG GTCCCCCCTA CGTGTCCTGG CTCATCGACG CCAACCACAA |
| 801 | CATGCAGATC TGGACCACTG GAGAATACTC CTTCAAGATC TTTCCAGAGA |
| 851 | AAAACATTCG TGGCTTCAAG CTCCCAGACA CACCTCAAGG CCTCCTGGGG |
| 901 | GAGGCCCGGA TGCTCAATGC CAGCATTGTG GCATCCTTCG TGGAGCTACC |
| 951 | GCTGGCCAGC ATTGTCTCAC TTCATGCCTC CAGCTGCGGT GGTAGGCTGC |
| 1001 | AGACCTCACC CGCACCGATC CAGACCACTC CTCCCACCGG TGGTGGAACT |
| 1051 | CACACATGCC CACCGTGCCC AGCACCTGAA CTCCTGGGGG GACCGTCAGT |
| 1101 | CTTCCTCTTC CCCCCAAAAC CCAAGGACAC CCTCATGATC TCCCGGACCC |
| 1151 | CTGAGGTCAC ATGCGTGGTG GTGGACGTGA GCCACGAAGA CCCTGAGGTC |
| 1201 | AAGTTCAACT GGTACGTGGA CGGCGTGGAG GTGCATAATG CCAAGACAAA |
| 1251 | GCCGCGGGAG GAGCAGTACA ACAGCACGTA CCGTGTGGTC AGCGTCCTCA |
| 1301 | CCGTCCTGCA CCAGGACTGG CTGAATGGCA AGGAGTACAA GTGCAAGGTC |
| 1351 | TCCAACAAAG CCCTCCCAGC CCCCATCGAG AAAACCATCT CCAAAGCCAA |
| 1401 | AGGGCAGCCC CGAGAACCAC AGGTGTACAC CCTGCCCCCA TCCCGGAAGG |
| 1451 | AGATGACCAA GAACCAGGTC AGCCTGACCT GCCTGGTCAA AGGCTTCTAT |
| 1501 | CCCAGCGACA TCGCCGTGGA GTGGGAGAGC AATGGGCAGC CGGAGAACAA |
| 1551 | CTACAAGACC ACGCCTCCCG TGCTGAAGTC CGACGGCTCC TTCTTCCTCT |
| 1601 | ATAGCAAGCT CACCGTGGAC AAGAGCAGGT GGCAGCAGGG GAACGTCTTC |
| 1651 | TCATGCTCCG TGATGCATGA GGCTCTGCAC AACCACTACA CGCAGAAGAG |
| 1701 | CCTCTCCCTG TCCCCGGGTA AA |

[0765] The mature ENG(26-346)-Fc fusion polypeptide (SEQ ID NO: 103) is as follows and may optionally be provided with the lysine removed from the C-terminus.

| (SEQ ID NO: 103) | |
|---|---|
| 1 | ETVHCDLQPV GPERDEVTYT TSQVSKGCVA QAPNAILEVH VLFLEFPTGP |
| 51 | SQLELTLQAS KQNGTWPREV LLVLSVNSSV FLHLQALGIP LHLAYNSSLV |
| 101 | TFQEPPGVNT TELPSFPKTQ ILEWAAERGP ITSAAELNDP QSILLRLGQA |
| 151 | QGSLSFCMLE ASQDMGRTLE WRPRTPALVR GCHLEGVAGH KEAHILRVLP |
| 201 | GHSAGPRTVT VKVELSCAPG DLDAVLILQG PPYVSWLIDA NHNMQIWTTG |
| 251 | EYSFKIFPEK NIRGFKLPDT PQGLLGEARM LNASIVASFV ELPLASIVSL |
| 301 | HASSCGGRLQ TSPAPIQTTP PTGGGTHTCP PCPAPELLGG PSVFLFPPKP |
| 351 | KDTLMISRTP EVTCVVVDVS HEDPEVKFNW YVDGVEVHNA KTKPREEQYN |
| 401 | STYRVVSVLT VLHQDWLNGK EYKCKVSNKA LPAPIEKTIS KAKGQPREPQ |
| 451 | VYTLPPSRKE MTKNQVSLTC LVKGFYPSDI AVEWESNGQP ENNYKTTPPV |
| 501 | LKSDGSFFLY SKLTVDKSRW QQGNVFSCSV MHEALHNHYT QKSLSLSPGK |

[0766] The complementary form of ALK1-Fc fusion polypeptide (SEQ ID NO: 104) is as follows:

| (SEQ ID NO: 104) | |
|---|---|
| 1 | MDAMKRGLCC VLLLCGAVFV SPGADPVKPS RGPLVTCTCE SPHCKGPTCR |
| 51 | GAWCTVVLVR EEGRHPQEHR GCGNLHRELC RGRPTEFVNH YCCDSHLCNH |
| 101 | NVSLVLEATQ PPSEQPGTDG QLATGGGTHT CPPCPAPELL GGPSVFLFPP |
| 151 | KPKDTLMISR TPEVTCVVVD VSHEDPEVKF NWYVDGVEVH NAKTKPREEQ |
| 201 | YNSTYRVVSV LTVLHQDWLN GKEYKCKVSN KALPAPIEKT ISKAKGQPRE |
| 251 | PQVYTLPPSR EEMTKNQVSL TCLVKGFYPS DIAVEWESNG QPENNYDTTP |
| 301 | PVLDSDGSFF LYSDLTVDKS RWQQGNVFSC SVMHEALHNH YTQKSLSLSP |
| 351 | G |

[0767] The leader sequence and linker sequence are underlined. To guide heterodimer formation with the ENG(26-346)-Fc fusion polypeptide of SEQ ID NOs: 101 and 103 above, two amino acid substitutions (replacing lysines with aspartic acids) can be introduced into the Fc domain of the ALK1-Fc fusion polypeptide as indicated by double underline above. The amino acid sequence of SEQ ID NO: 104 may optionally be provided with a lysine added at the C-terminus.

[0768] This ALK1-Fc fusion protein is encoded by the following nucleic acid (SEQ ID NO: 105):

| (SEQ ID NO: 105) | |
|---|---|
| 1 | ATGGATGCAA TGAAGAGAGG GCTCTGCTGT GTGCTGCTGC TGTGTGGAGC |
| 51 | AGTCTTCGTT TCGCCCGGCG CCGACCCTGT GAAGCCGTCT CGGGGCCCGC |
| 101 | TGGTGACCTG CACGTGTGAG AGCCCACATT GCAAGGGGCC TACCTGCCGG |
| 151 | GGGGCCTGGT GCACAGTAGT GCTGGTGCGG GAGGAGGGGA GGCACCCCCA |
| 201 | GGAACATCGG GGCTGCGGGA ACTTGCACAG GGAGCTCTGC AGGGGCCGCC |
| 251 | CCACCGAGTT CGTCAACCAC TACTGCTGCG ACAGCCACCT CTGCAACCAC |
| 301 | AACGTGTCCC TGGTGCTGGA GGCCACCCAA CCTCCTTCGG AGCAGCCGGG |
| 351 | AACAGATGGC CAGCTGGCCA CCGGTGGTGG AACTCACACA TGCCCACCGT |
| 401 | GCCCAGCACC TGAACTCCTG GGGGGACCGT CAGTCTTCCT CTTCCCCCCA |
| 451 | AAACCCAAGG ACACCCTCAT GATCTCCCGG ACCCCTGAGG TCACATGCGT |
| 501 | GGTGGTGGAC GTGAGCCACG AAGACCCTGA GGTCAAGTTC AACTGGTACG |
| 551 | TGGACGGCGT GGAGGTGCAT AATGCCAAGA CAAAGCCGCG GGAGGAGCAG |
| 601 | TACAACAGCA CGTACCGTGT GGTCAGCGTC CTCACCGTCC TGCACCAGGA |
| 651 | CTGGCTGAAT GGCAAGGAGT ACAAGTGCAA GGTCTCCAAC AAAGCCCTCC |
| 701 | CAGCCCCCAT CGAGAAAACC ATCTCCAAAG CCAAAGGGCA GCCCCGAGAA |
| 751 | CCACAGGTGT ACACCCTGCC CCCATCCCGG GAGGAGATGA CCAAGAACCA |
| 801 | GGTCAGCCTG ACCTGCCTGG TCAAAGGCTT CTATCCCAGC GACATCGCCG |
| 851 | TGGAGTGGGA GAGCAATGGG CAGCCGGAGA ACAACTACGA CACCACGCCT |
| 901 | CCCGTGCTGG ACTCCGACGG CTCCTTCTTC CTCTATAGCG ACCTCACCGT |
| 951 | GGACAAGAGC AGGTGGCAGC AGGGGAACGT CTTCTCATGC TCCGTGATGC |
| 1001 | ATGAGGCTCT GCACAACCAC TACACGCAGA AGAGCCTCTC CCTGTCTCCG |
| 1051 | GGT |

[0769] A processed ALK1-Fc fusion protein sequence (SEQ ID NO: 106) is as follows and may optionally be provided with a lysine added at the C-terminus.

| (SEQ ID NO: 106) | |
|---|---|
| 1 | DPVKPSRGPL VTCTCESPHC KGPTCRGAWC TVVLVREEGR HPQEHRGCGN |
| 51 | LHRELCRGRP TEFVNHYCCD SHLCNHNVSL VLEATQPPSE QPGTDGQLAT |
| 101 | GGGTHTCPPC PAPELLGGPS VFLFPPKPKD TLMISRTPEV TCVVVDVSHE |
| 151 | DPEVKFNWYV DGVEVHNAKT KPREEQYNST YRVVSVLTVL HQDWLNGKEY |
| 201 | KCKVSNKALP APIEKTISKA KGQPREPQVY TLPPSREEMT KNQVSLTCLV |
| 251 | KGFYPSDIAV EWESNGQPEN NYDTTPPVLD SDGSFFLYSD LTVDKSRWQQ |
| 301 | GNVFSCSVMH EALHNHYTQK SLSLSPG |

[0770] The ENG(26-346)-Fc and ALK1-Fc proteins of SEQ ID NO: 103 and SEQ ID NO: 106, respectively, may be co-expressed and purified from a CHO cell line, to give rise to a heteromultimer comprising ENG(26-346)-Fc:ALK1-Fc.

[0771] In a second approach to promote the formation of heteromultimer using asymmetric Fc fusion proteins, the Fc domains are altered to introduce complementary hydrophobic interactions and an additional intermolecular disulfide bond.

[0772] The ENG(26-346)-Fc polypeptide sequence (SEQ ID NO: 801) is shown below:

| (SEQ ID NO: 801) | |
|---|---|
| 1 | MDAMKRGLCC VLLLCGAVFV SPGAETVHCD LQPVGPERDE VTYTTSQVSK |
| 51 | GCVAQAPNAI LEVHVLFLEF PTGPSQLELT LQASKQNGTW PREVLLVLSV |
| 101 | NSSVFLHLQA LGIPLHLAYN SSLVTFQEPP GVNTTELPSF PKTQILEWAA |
| 151 | ERGPITSAAE LNDPQSILLR LGQAQGSLSF CMLEASQDMG RTLEWRPRTP |
| 201 | ALVRGCHLEG VAGHKEAHIL RVLPGHSAGP RTVTVKVELS CAPGDLDAVL |
| 251 | ILQGPPYVSW LIDANHNMQI WTTGEYSFKI FPEKNIRGFK LPDTPQGLLG |
| 301 | EARMLNASIV ASFVELPLAS IVSLHASSCG GRLQTSPAPI QTTPPTGGGT |
| 351 | HTCPPCPAPE LLGGPSVFLF PPKPKDTLMI SRTPEVTCVV VDVSHEDPEV |
| 401 | KFNWYVDGVE VHNAKTKPRE EQYNSTYRVV SVLTVLHQDW LNGKEYKCKV |
| 451 | SNKALPAPIE KTISKAKGQP REPQVYTLPP CREEMTKNQV SLWCLVKGFY |
| 501 | PSDIAVEWES NGQPENNYKT TPPVLDSDGS FFLYSKLTVD KSRWQQGNVF |
| 551 | SCSVMHEALH NHYTQKSLSL SPGK |

[0773] The leader sequence and linker sequence are underlined. To promote formation of the ENG(26-346)-Fc:ALK1-Fc heterodimer rather than either of the possible homodimeric complexes, two amino acid substitutions (replacing a serine with a cysteine and a threonine with a tryptophan) can be introduced into the Fc domain of the fusion protein as indicated by double underline above. The amino acid sequence of SEQ ID NO: 801 may optionally be provided with the lysine removed from the C-terminus.

[0774] A processed ENG(26-346)-Fc fusion polypeptide (SEQ ID NO: 802) is as follows and may optionally be provided with the lysine (K) removed from the C-terminus.

| (SEQ ID NO: 802) | |
|---|---|
| 1 | ETVHCDLQPV GPERDEVTYT TSQVSKGCVA QAPNAILEVH VLFLEFPTGP |
| 51 | SQLELTLQAS KQNGTWPREV LLVLSVNSSV FLHLQALGIP LHLAYNSSLV |
| 101 | TFQEPPGVNT TELPSFPKTQ ILEWAAERGP ITSAAELNDP QSILLRLGQA |
| 151 | QGSLSFCMLE ASQDMGRTLE WRPRTPALVR GCHLEGVAGH KEAHILRVLP |
| 201 | GHSAGPRTVT VKVELSCAPG DLDAVLILQG PPYVSWLIDA NHNMQIWTTG |
| 251 | EYSFKIFPEK NIRGFKLPDT PQGLLGEARM LNASIVASFV ELPLASIVSL |
| 301 | HASSCGGRLQ TSPAPIQTTP PTGGGTHTCP PCPAPELLGG PSVFLFPPKP |
| 351 | KDTLMISRTP EVTCVVVDVS HEDPEVKFNW YVDGVEVHNA KTKPREEQYN |
| 401 | STYRVVSVLT VLHQDWLNGK EYKCKVSNKA LPAPIEKTIS KAKGQPREPQ |
| 451 | VYTLPPCREE MTKNQVSLWC LVKGFYPSDI AVEWESNGQP ENNYKTTPPV |
| 501 | LDSDGSFFLY SKLTVDKSRW QQGNVFSCSV MHEALHNHYT QKSLSLSPGK |

[0775] The complementary form of ALK1-Fc fusion polypeptide (SEQ ID NO: 803) is as follows:

| (SEQ ID NO: 803) | |
|---|---|
| 1 | MDAMKRGLCC VLLLCGAVFV SPGADPVKPS RGPLVTCTCE SPHCKGPTCR |
| 51 | GAWCTVVLVR EEGRHPQEHR GCGNLHRELC RGRPTEFVNH YCCDSHLCNH |
| 101 | NVSLVLEATQ PPSEQPGTDG QLATGGGTHT CPPCPAPELL GGPSVFLFPP |
| 151 | KPKDTLMISR TPEVTCVVVD VSHEDPEVKF NWYVDGVEVH NAKTKPREEQ |
| 201 | YNSTYRVVSV LTVLHQDWLN GKEYKCKVSN KALPAPIEKT ISKAKGQPRE |
| 251 | PQVCTLPPSR EEMTKNQVSL SCAVKGFYPS DIAVEWESNG QPENNYKTTP |
| 301 | PVLDSDGSFF LVSKLTVDKS RWQQGNVFSC SVMHEALHNH YTQKSLSLSP |
| 351 | GK |

[0776] The leader sequence and linker sequence are underlined. To guide heterodimer formation with the ENG(26-346)-Fc fusion polypeptide of SEQ ID NOs: 801 and 802 above, four amino acid substitutions can be introduced into the Fc domain of the ALK1 fusion polypeptide as indicated by double underline above. The amino acid sequence of SEQ ID NO: 803 may optionally be provided with the lysine removed from the C-terminus.

[0777] A processed ALK1-Fc fusion protein sequence (SEQ ID NO: 804) is as follows and may optionally be provided with the lysine removed from the C-terminus.

| (SEQ ID NO: 804) | |
|---|---|
| 1 | DPVKPSRGPL VTCTCESPHC KGPTCRGAWC TVVLVREEGR HPQEHRGCGN |
| 51 | LHRELCRGRP TEFVNHYCCD SHLCNHNVSL VLEATQPPSE QPGTDGQLAT |
| 101 | GGGTHTCPPC PAPELLGGPS VFLFPPKPKD TLMISRTPEV TCVVVDVSHE |
| 151 | DPEVKFNWYV DGVEVHNAKT KPREEQYNST YRVVSVLTVL HQDWLNGKEY |
| 201 | KCKVSNKALP APIEKTISKA KGQPREPQVC TLPPSREEMT KNQVSLSCAV |
| 251 | KGFYPSDIAV EWESNGQPEN NYKTTPPVLD SDGSFFLVSK LTVDKSRWQQ |
| 301 | GNVFSCSVMH EALHNHYTQK SLSLSPGK |

[0778] The ENG(26-346)-Fc and ALK1-Fc proteins of SEQ ID NO: 802 and SEQ ID NO: 804, respectively, may be co-expressed and purified from a CHO cell line, to give rise to a heteromultimer comprising ENG(26-346)-Fc:ALK1-Fc.

[0779] A third approach to promote the formation of heteromultimer complexes using asymmetric Fc fusion proteins is illustrated in the ENG-Fc and ALK1-Fc polypeptide sequences of SEQ ID NOs: 807-809 and 810-812, respectively. In this approach, the Fc domains are altered to introduce complementary hydrophobic interactions and an additional intermolecular disulfide bond as described in the second approach above. In addition, substitutions are also made in the Fc domains to alter net molecular charge, thereby facilitating purification of the desired protein complex. The ENG(26-346)-Fc fusion polypeptide and ALK1-Fc fusion polypeptide each employ the TPA leader.

[0780] The ENG(26-346)-Fc polypeptide sequence (SEQ ID NO: 807) is shown below:

| (SEQ ID NO: 807) | |
|---|---|
| 1 | MDAMKRGLCC VLLLCGAVFV SPGAETVHCD LQPVGPERDE VTYTTSQVSK |
| 51 | GCVAQAPNAI LEVHVLFLEF PTGPSQLELT LQASKQNGTW PREVLLVLSV |
| 101 | NSSVFLHLQA LGIPLHLAYN SSLVTFQEPP GVNTTELPSF PKTQILEWAA |
| 151 | ERGPITSAAE LNDPQSILLR LGQAQGSLSF CMLEASQDMG RTLEWRPRTP |
| 201 | ALVRGCHLEG VAGHKEAHIL RVLPGHSAGP RTVTVKVELS CAPGDLDAVL |
| 251 | ILQGPPYVSW LIDANHNMQI WTTGEYSFKI FPEKNIRGFK LPDTPQGLLG |
| 301 | EARMLNASIV ASFVELPLAS IVSLHASSCG GRLQTSPAPI QTTPPTGGGT |
| 351 | HTCPPCPAPE LLGGPSVFLF PPKPKDTLMI SRTPEVTCVV VDVSHEDPEV |
| 401 | KFNWYVDGVE VHNAKTKPRE EQYNSTYRVV SVLTVLHQDW LNGKEYKCKV |
| 451 | SNKALPAPIE KTISKAKGQP REPQVCTLPP SREEMTKNQV SLSCAVKGFY |
| 501 | PSDIAVEWES RGQPENNYKT TPPVLDSRGS FFLVSKLTVD KSRWQQGNVF |
| 551 | SCSVMHEALH NHYTQKSLSL SPG |

[0781] The leader sequence and linker sequence are underlined. To promote formation of the ENG(26-346)-Fc:ALK1-Fc heterodimer rather than either of the possible homodimerics, four amino acid substitutions (replacement of a tyrosine with cysteine, a threonine with serine, a leucine with alanine, and a tyrosine with valine) can be introduced into the Fc domain of the ENG fusion polypeptide as indicated by double underline above. As indicated by single underline, two additional amino acid substitutions (replacement of an asparagine and an aspartate with arginines) can also be introduced into this Fc domain to facilitate purification of the desired heterodimer on the basis of net molecular charge. The amino acid sequence of SEQ ID NO: 807 may optionally be provided with a lysine added at the C-terminus.

[0782] This ENG(26-346)-Fc fusion protein is encoded by the following nucleic acid sequence (SEQ ID NO: 808) in which the leader sequence and linker sequence are underlined:

| (SEQ ID NO: 808) | |
|---|---|
| 1 | ATGGATGCAA TGAAGAGAGG GCTCTGCTGT GTGCTGCTGC TGTGTGGAGC |
| 51 | AGTCTTCGTT TCGCCCGGCG CCGAAACAGT CCATTGTGAC CTTCAGCCTG |
| 101 | TGGGCCCCGA GAGGGACGAG GTGACATATA CCACTAGCCA GGTCTCGAAG |
| 151 | GGCTGCGTGG CTCAGGCCCC CAATGCCATC CTTGAAGTCC ATGTCCTCTT |
| 201 | CCTGGAGTTC CCAACGGGCC CGTCACAGCT GGAGCTGACT CTCCAGGCAT |
| 251 | CCAAGCAAAA TGGCACCTGG CCCCGAGAGG TGCTTCTGGT CCTCAGTGTA |
| 301 | AACAGCAGTG TCTTCCTGCA TCTCCAGGCC CTGGGAATCC CACTGCACTT |
| 351 | GGCCTACAAT TCCAGCCTGG TCACCTTCCA AGAGCCCCCG GGGGTCAACA |
| 401 | CCACAGAGCT GCCATCCTTC CCCAAGACCC AGATCCTTGA GTGGGCAGCT |
| 451 | GAGAGGGGCC CCATCACCTC TGCTGCTGAG CTGAATGACC CCCAGAGCAT |
| 501 | CCTCCTCCGA CTGGGCCAAG CCCAGGGGTC ACTGTCCTTC TGCATGCTGG |
| 551 | AAGCCAGCCA GGACATGGGC CGCACGCTCG AGTGGCGGCC GCGTACTCCA |
| 601 | GCCTTGGTCC GGGGCTGCCA CTTGGAAGGC GTGGCCGGCC ACAAGGAGGC |
| 651 | GCACATCCTG AGGGTCCTGC CGGGCCACTC GGCCGGGCCC CGGACGGTGA |
| 701 | CGGTGAAGGT GGAACTGAGC TGCGCACCCG GGGATCTCGA TGCCGTCCTC |
| 751 | ATCCTGCAGG GTCCCCCCTA CGTGTCCTGG CTCATCGACG CCAACCACAA |
| 801 | CATGCAGATC TGGACCACTG GAGAATACTC CTTCAAGATC TTTCCAGAGA |
| 851 | AAAACATTCG TGGCTTCAAG CTCCCAGACA CACCTCAAGG CCTCCTGGGG |
| 901 | GAGGCCCGGA TGCTCAATGC CAGCATTGTG GCATCCTTCG TGGAGCTACC |
| 951 | GCTGGCCAGC ATTGTCTCAC TTCATGCCTC CAGCTGCGGT GGTAGGCTGC |
| 1001 | AGACCTCACC CGCACCGATC CAGACCACTC CTCCCACCGG TGGTGGAACT |
| 1051 | CACACATGCC CACCGTGCCC AGCACCTGAA CTCCTGGGGG GACCGTCAGT |
| 1101 | CTTCCTCTTC CCCCCAAAAC CCAAGGACAC CCTCATGATC TCCCGGACCC |
| 1151 | CTGAGGTCAC ATGCGTGGTG GTGGACGTGA GCCACGAAGA CCCTGAGGTC |
| 1201 | AAGTTCAACT GGTACGTGGA CGGCGTGGAG GTGCATAATG CCAAGACAAA |
| 1251 | GCCGCGGGAG GAGCAGTACA ACAGCACGTA CCGTGTGGTC AGCGTCCTCA |
| 1301 | CCGTCCTGCA CCAGGACTGG CTGAATGGCA AGGAGTACAA GTGCAAGGTC |
| 1351 | TCCAACAAAG CCCTCCCAGC CCCCATCGAG AAAACCATCT CCAAAGCCAA |
| 1401 | AGGGCAGCCC CGAGAACCAC AGGTGTGCAC CCTGCCCCCA TCCCGGGAGG |
| 1451 | AGATGACCAA GAACCAGGTC AGCCTGTCCT GCGCCGTCAA AGGCTTCTAT |
| 1501 | CCCAGCGACA TCGCCGTGGA GTGGGAGAGC CGCGGGCAGC CGGAGAACAA |
| 1551 | CTACAAGACC ACGCCTCCCG TGCTGGACTC CCGCGGCTCC TTCTTCCTCG |
| 1601 | TGAGCAAGCT CACCGTGGAC AAGAGCAGGT GGCAGCAGGG GAACGTCTTC |
| 1651 | TCATGCTCCG TGATGCATGA GGCTCTGCAC AACCACTACA CGCAGAAGAG |
| 1701 | CCTCTCCCTG TCTCCGGGT |

[0783] A processed ENG(26-346)-Fc fusion polypeptide (SEQ ID NO: 809) is as follows and may optionally be provided with a lysine added at the C-terminus.

| (SEQ ID NO: 809) | |
|---|---|
| 1 | ETVHCDLQPV GPERDEVTYT TSQVSKGCVA QAPNAILEVH VLFLEFPTGP |
| 51 | SQLELTLQAS KQNGTWPREV LLVLSVNSSV FLHLQALGIP LHLAYNSSLV |
| 101 | TFQEPPGVNT TELPSFPKTQ ILEWAAERGP ITSAAELNDP QSILLRLGQA |
| 151 | QGSLSFCMLE ASQDMGRTLE WRPRTPALVR GCHLEGVAGH KEAHILRVLP |
| 201 | GHSAGPRTVT VKVELSCAPG DLDAVLILQG PPYVSWLIDA NHNMQIWTTG |
| 251 | EYSFKIFPEK NIRGFKLPDT PQGLLGEARM LNASIVASFV ELPLASIVSL |
| 301 | HASSCGGRLQ TSPAPIQTTP PTGGGTHTCP PCPAPELLGG PSVFLFPPKP |
| 351 | KDTLMISRTP EVTCVVVDVS HEDPEVKFNW YVDGVEVHNA KTKPREEQYN |
| 401 | STYRVVSVLT VLHQDWLNGK EYKCKVSNKA LPAPIEKTIS KAKGQPREPQ |
| 451 | VCTLPPSREE MTKNQVSLSC AVKGFYPSDI AVEWESRGQP ENNYKTTPPV |
| 501 | LDSRGSFFLV SKLTVDKSRW QQGNVFSCSV MHEALHNHYT QKSLSLSPG |

[0784] The complementary form of ALK1-Fc fusion polypeptide (SEQ ID NO: 810) is as follows:

| (SEQ ID NO: 810) | |
|---|---|
| 1 | MDAMKRGLCC VLLLCGAVFV SPGADPVKPS RGPLVTCTCE SPHCKGPTCR |
| 51 | GAWCTVVLVR EEGRHPQEHR GCGNLHRELC RGRPTEFVNH YCCDSHLCNH |
| 101 | NVSLVLEATQ PPSEQPGTDG QLATGGGTHT CPPCPAPELL GGPSVFLFPP |
| 151 | KPKDTLMISR TPEVTCVVVD VSHEDPEVKF NWYVDGVEVH NAKTKPREEQ |
| 201 | YNSTYRVVSV LTVLHQDWLN GKEYKCKVSN KALPAPIEKT ISKAKGQPRE |
| 251 | PQVYTLPPCR EEMTENQVSL WCLVKGFYPS DIAVEWESNG QPENNYKTTP |
| 301 | PVLDSDGSFF LYSKLTVDKS RWQQGNVFSC SVMHEALHNH YTQDSLSLSP |
| 351 | G |

[0785] The leader sequence and linker sequence are underlined. To guide heterodimer formation with the ENG(26-346)-Fc fusion polypeptide of SEQ ID NOs: 807 and 809 above, two amino acid substitutions (replacing a serine with cysteine and a threonine with tryptophan) can be introduced into the Fc domain of the ALK1-Fc fusion polypeptide as indicated by double underline above. As indicated by single underline, two additional amino acid substitutions (replacement of lysines with glutamate and aspartate) can also be introduced into this Fc domain to facilitate purification of the desired heterodimer on the basis of net molecular charge. The amino acid sequence of SEQ ID NO: 810 may optionally be provided with a lysine added at the C-terminus.

[0786] This ALK1-Fc fusion protein is encoded by the following nucleic acid (SEQ ID NO: 811) in which the leader sequence and linker sequence are underlined:

| (SEQ ID NO: 811) | |
|---|---|
| 1 | ATGGATGCAA TGAAGAGAGG GCTCTGCTGT GTGCTGCTGC TGTGTGGAGC |
| 51 | AGTCTTCGTT TCGCCCGGCG CCGACCCTGT GAAGCCGTCT CGGGGCCCGC |
| 101 | TGGTGACCTG CACGTGTGAG AGCCCACATT GCAAGGGGCC TACCTGCCGG |
| 151 | GGGGCCTGGT GCACAGTAGT GCTGGTGCGG GAGGAGGGGA GGCACCCCCA |
| 201 | GGAACATCGG GGCTGCGGGA ACTTGCACAG GGAGCTCTGC AGGGGCCGCC |
| 251 | CCACCGAGTT CGTCAACCAC TACTGCTGCG ACAGCCACCT CTGCAACCAC |
| 301 | AACGTGTCCC TGGTGCTGGA GGCCACCCAA CCTCCTTCGG AGCAGCCGGG |
| 351 | AACAGATGGC CAGCTGGCCA CCGGTGGTGG AACTCACACA TGCCCACCGT |
| 401 | GCCCAGCACC TGAACTCCTG GGGGGACCGT CAGTCTTCCT CTTCCCCCCA |
| 451 | AAACCCAAGG ACACCCTCAT GATCTCCCGG ACCCCTGAGG TCACATGCGT |
| 501 | GGTGGTGGAC GTGAGCCACG AAGACCCTGA GGTCAAGTTC AACTGGTACG |
| 551 | TGGACGGCGT GGAGGTGCAT AATGCCAAGA CAAAGCCGCG GGAGGAGCAG |
| 601 | TACAACAGCA CGTACCGTGT GGTCAGCGTC CTCACCGTCC TGCACCAGGA |
| 651 | CTGGCTGAAT GGCAAGGAGT ACAAGTGCAA GGTCTCCAAC AAAGCCCTCC |
| 701 | CAGCCCCCAT CGAGAAAACC ATCTCCAAAG CCAAAGGGCA GCCCCGAGAA |
| 751 | CCACAGGTGT ACACCCTGCC CCCATGCCGG GAGGAGATGA CCGAGAACCA |
| 801 | GGTCAGCCTG TGGTGCCTGG TCAAAGGCTT CTATCCCAGC GACATCGCCG |
| 851 | TGGAGTGGGA GAGCAATGGG CAGCCGGAGA ACAACTACAA GACCACGCCT |
| 901 | CCCGTGCTGG ACTCCGACGG CTCCTTCTTC CTCTATAGCA AGCTCACCGT |
| 951 | GGACAAGAGC AGGTGGCAGC AGGGGAACGT CTTCTCATGC TCCGTGATGC |
| 1001 | ATGAGGCTCT GCACAACCAC TACACGCAGG ACAGCCTCTC CCTGTCTCCG |
| 1051 | GGT |

[0787] The mature ALK1-Fc fusion protein sequence (SEQ ID NO: 812) is as follows and may optionally be provided with a lysine added at the C-terminus.

| (SEQ ID NO: 812) | |
|---|---|
| 1 | DPVKPSRGPL VTCTCESPHC KGPTCRGAWC TVVLVREEGR HPQEHRGCGN |
| 51 | LHRELCRGRP TEFVNHYCCD SHLCNHNVSL VLEATQPPSE QPGTDGQLAT |
| 101 | GGGTHTCPPC PAPELLGGPS VFLFPPKPKD TLMISRTPEV TCVVVDVSHE |
| 151 | DPEVKFNWYV DGVEVHNAKT KPREEQYNST YRVVSVLTVL HQDWLNGKEY |
| 201 | KCKVSNKALP APIEKTISKA KGQPREPQVY TLPPCREEMT ENQVSLWCLV |
| 251 | KGFYPSDIAV EWESNGQPEN NYKTTPPVLD SDGSFFLYSK LTVDKSRWQQ |
| 301 | GNVFSCSVMH EALHNHYTQD SLSLSPG |

[0788] The ENG(26-346)-Fc and ALK1-Fc proteins of SEQ ID NO: 809 and SEQ ID NO: 812, respectively, may be co-expressed and purified from a CHO cell line, to give rise to a heteromeric complex comprising ENG(26-346)-Fc:ALK1-Fc.

[0789] Purification of various ENG-Fc:ALK1-Fc complexes could be achieved by a series of column chromatography steps, including, for example, three or more of the following, in any order: protein A chromatography, Q sepharose chromatography, phenylsepharose chromatography, size exclusion chromatography, cation exchange chromatography, epitope-based affinity chromatography (e.g., with an antibody or functionally equivalent ligand directed against an epitope on ENG or ALK1), and multimodal chromatography (e.g., with resin containing both electrostatic and hydrophobic ligands). The purification could be completed with viral filtration and buffer exchange.

### Example 2. Ligand Binding Profile of an ENG-Fc:ALK1-Fc Heterodimer

[0790] In a preliminary screen of 20 different ligands, only BMP9 and BMP10 exhibited binding to an ENG(26-346)-Fc:ALK1-Fc heterodimeric complex. A Biacore™-based binding assay was then used to compare ligand binding properties of ENG(26-346)-Fc:ALK1-Fc heterodimer with those of ENG(26-346)-Fc:Fc monomeric, ALK1-Fc:Fc monomeric complex, and ALK1-Fc:ALK1-Fc homodimer. These protein complexes were independently captured in the system using an anti-Fc antibody. Ligands were injected and allowed to flow over the captured receptor protein. Results are summarized in the table below, in which ligand off-rates (k_{d}) most indicative of effective ligand traps are denoted by bold text.

Ligand binding profile of ENG(26-346)-Fc:ALK1-Fc heterodimer compared to
ENG(26-346)-Fc monomer, ALK1-Fc monomer, and ALK1-Fc homodimer

| | Ligand | | | | | |
|---|---|---|---|---|---|---|
| | BMP9 | | | BMP10 | | |
| | kₐ | k_{d} | K_{D} | kₐ | k_{d} | K_{D} |
| Protein | (1/Ms) | (1/s) | (pM) | (1/Ms) | (1/s) | (pM) |
| ENG(26-346)-Fc:Fc | Transient binding | | >36000 | No binding | | |
| ALK1-Fc:Fc | 5.1 × 10⁶ | 1.1 × 10⁻³ | 210 | 7.5 × 10⁶ | 5.1 × 10⁻⁴ | 69 |
| ALK1-Fc:ALK1-Fc | 7.9 × 10⁶ | 1.3 × 10⁻⁴ | 16 | 4.1 × 10⁶ | 1.6 × 10⁻⁴ | 37 |
| ENG(26-346)-Fc:ALK1-Fc | 1.1 × 10⁷ | 3.9 × 10⁻⁴ | 35 | 1.4 × 10⁷ | 4.7 × 10⁻⁴ | 33 |

[0791] These binding data demonstrate that an ENG-Fc:ALK1-Fc heterodimer has useful ligand binding properties differing from those exhibited by either of the monomeric complexes. Specifically, the ENG(26-346)-Fc:ALK1-Fc heterodimer displayed enhanced binding to BMP9 and similar binding to BMP10 compared with the ALK1-Fc:Fc complex, whereas the ENG(26-346)-Fc:Fc complex showed only transient binding to BMP9 and no binding to BMP10. On the other hand, ENG(26-346)-Fc:ALK1-Fc heterodimer bound BMP9 and BMP10 with off-rate constants (k_{d}) and equilibrium dissociation constants (K_{D}) similar to those of ALK1-Fc homodimer. These results therefore demonstrate that an ENG-Fc:ALK1-Fc heterodimer has a ligand binding profile similar to that of ALK1-Fc homodimer. Accordingly, an ENG-Fc:ALK1-Fc heterodimer will be useful in therapeutic applications where it is desirable to antagonize BMP9 and BMP10.

### Example 3. Generation of an ENG-Fc:ALK2-Fc Heterodimer

[0792] A soluble ENG-Fc:ALK2-Fc heterodimer can be generated comprising a C-terminally truncated extracellular domain of human endoglin (ENG) and the extracellular domain of human ALK2, which are each fused to an Fc domain with a linker positioned between the extracellular domain and the Fc domain. The individual constructs are referred to as ENG(26-346)-Fc and ALK2-Fc fusion proteins, respectively.

[0793] Formation of heteromeric ENG(26-346)-Fc:ALK2-Fc may be guided by approaches similar to those described in Example 1.

[0794] In a first approach, the polypeptide sequence of the ENG(26-346)-Fc fusion protein and a nucleic acid sequence encoding it are provided in Example 1 as SEQ ID NOs: 101-103.

[0795] The complementary ALK2-Fc fusion protein employs the TPA leader and is as follows (SEQ ID NO: 107):

| (SEQ ID NO: 107) | |
|---|---|
| 1 | MDAMKRGLCC VLLLCGAVFV SPGAMEDEKP KVNPKLYMCV CEGLSCGNED |
| 51 | HCEGQQCFSS LSINDGFHVY QKGCFQVYEQ GKMTCKTPPS PGQAVECCQG |
| 101 | DWCNRNITAQ LPTKGKSFPG TQNFHLETGG GTHTCPPCPA PELLGGPSVF |
| 151 | LFPPKPKDTL MISRTPEVTC VVVDVSHEDP EVKFNWYVDG VEVHNAKTKP |
| 201 | REEQYNSTYR VVSVLTVLHQ DWLNGKEYKC KVSNKALPAP IEKTISKAKG |
| 251 | QPREPQVYTL PPSREEMTKN QVSLTCLVKG FYPSDIAVEW ESNGQPENNY |
| 301 | DTTPPVLDSD GSFFLYSDLT VDKSRWQQGN VFSCSVMHEA LHNHYTQKSL |
| 351 | SLSPG |

[0796] The signal sequence and linker sequence are underlined. To promote formation of the ENG(26-346)-Fc:ALK2-Fc heterodimer rather than either of the possible homodimeric complexes, two amino acid substitutions (replacing lysines with aspartic acids) can be introduced into the Fc domain of the fusion protein as indicated by double underline above. The amino acid sequence of SEQ ID NO: 107 may optionally be provided with a lysine added at the C-terminus.

[0797] This ALK2-Fc fusion protein is encoded by the following nucleic acid (SEQ ID NO: 108):

| (SEQ ID NO: 108) | |
|---|---|
| 1 | ATGGATGCAA TGAAGAGAGG GCTCTGCTGT GTGCTGCTGC TGTGTGGAGC |
| 51 | AGTCTTCGTT TCGCCCGGCG CCATGGAAGA TGAGAAGCCC AAGGTCAACC |
| 101 | CCAAACTCTA CATGTGTGTG TGTGAAGGTC TCTCCTGCGG TAATGAGGAC |
| 151 | CACTGTGAAG GCCAGCAGTG CTTTTCCTCA CTGAGCATCA ACGATGGCTT |
| 201 | CCACGTCTAC CAGAAAGGCT GCTTCCAGGT TTATGAGCAG GGAAAGATGA |
| 251 | CCTGTAAGAC CCCGCCGTCC CCTGGCCAAG CTGTGGAGTG CTGCCAAGGG |
| 301 | GACTGGTGTA ACAGGAACAT CACGGCCCAG CTGCCCACTA AAGGAAAATC |
| 351 | CTTCCCTGGA ACACAGAATT TCCACTTGGA GACCGGTGGT GGAACTCACA |
| 401 | CATGCCCACC GTGCCCAGCA CCTGAACTCC TGGGGGGACC GTCAGTCTTC |
| 451 | CTCTTCCCCC CAAAACCCAA GGACACCCTC ATGATCTCCC GGACCCCTGA |
| 501 | GGTCACATGC GTGGTGGTGG ACGTGAGCCA CGAAGACCCT GAGGTCAAGT |
| 551 | TCAACTGGTA CGTGGACGGC GTGGAGGTGC ATAATGCCAA GACAAAGCCG |
| 601 | CGGGAGGAGC AGTACAACAG CACGTACCGT GTGGTCAGCG TCCTCACCGT |
| 651 | CCTGCACCAG GACTGGCTGA ATGGCAAGGA GTACAAGTGC AAGGTCTCCA |
| 701 | ACAAAGCCCT CCCAGCCCCC ATCGAGAAAA CCATCTCCAA AGCCAAAGGG |
| 751 | CAGCCCCGAG AACCACAGGT GTACACCCTG CCCCCATCCC GGGAGGAGAT |
| 801 | GACCAAGAAC CAGGTCAGCC TGACCTGCCT GGTCAAAGGC TTCTATCCCA |
| 851 | GCGACATCGC CGTGGAGTGG GAGAGCAATG GGCAGCCGGA GAACAACTAC |
| 901 | GACACCACGC CTCCCGTGCT GGACTCCGAC GGCTCCTTCT TCCTCTATAG |
| 951 | CGACCTCACC GTGGACAAGA GCAGGTGGCA GCAGGGGAAC GTCTTCTCAT |
| 1001 | GCTCCGTGAT GCATGAGGCT CTGCACAACC ACTACACGCA GAAGAGCCTC |
| 1051 | TCCCTGTCTC CGGGT |

[0798] A processed ALK2-Fc fusion protein sequence (SEQ ID NO: 109) is as follows and may optionally be provided with a lysine added at the C-terminus.

| (SEQ ID NO: 109) | |
|---|---|
| 1 | MEDEKPKVNP KLYMCVCEGL SCGNEDHCEG QQCFSSLSIN DGFHVYQKGC |
| 51 | FQVYEQGKMT CKTPPSPGQA VECCQGDWCN RNITAQLPTK GKSFPGTQNF |
| 101 | HLETGGGTHT CPPCPAPELL GGPSVFLFPP KPKDTLMISR TPEVTCVVVD |
| 151 | VSHEDPEVKF NWYVDGVEVH NAKTKPREEQ YNSTYRVVSV LTVLHQDWLN |
| 201 | GKEYKCKVSN KALPAPIEKT ISKAKGQPRE PQVYTLPPSR EEMTKNQVSL |
| 251 | TCLVKGFYPS DIAVEWESNG QPENNYDTTP PVLDSDGSFF LYSDLTVDKS |
| 301 | RWQQGNVFSC SVMHEALHNH YTQKSLSLSP G |

[0799] The ENG(26-346)-Fc and ALK2-Fc fusion proteins of SEQ ID NO: 103 and SEQ ID NO: 109, respectively, may be co-expressed and purified from a CHO cell line to give rise to a heteromeric complex comprising ENG(26-346)-Fc:ALK2-Fc.

[0800] In another approach to promoting the formation of heteromultimers using asymmetric Fc fusion proteins, illustrated in the ENG(26-346)-Fc and ALK2-Fc polypeptide sequences of SEQ ID NOs: 801-802 and 805-806, respectively, the Fc domains are altered to introduce complementary hydrophobic interactions and an additional intermolecular disulfide bond. The ENG(26-346)-Fc fusion polypeptide sequences are discussed in Example 1.

[0801] The complementary form of ALK2-Fc fusion polypeptide (SEQ ID NO: 805) is as follows:

| (SEQ ID NO: 805) | |
|---|---|
| 1 | MDAMKRGLCC VLLLCGAVFV SPGAMEDEKP KVNPKLYMCV CEGLSCGNED |
| 51 | HCEGQQCFSS LSINDGFHVY QKGCFQVYEQ GKMTCKTPPS PGQAVECCQG |
| 101 | DWCNRNITAQ LPTKGKSFPG TQNFHLETGG GTHTCPPCPA PELLGGPSVF |
| 151 | LFPPKPKDTL MISRTPEVTC VVVDVSHEDP EVKFNWYVDG VEVHNAKTKP |
| 201 | REEQYNSTYR VVSVLTVLHQ DWLNGKEYKC KVSNKALPAP IEKTISKAKG |
| 251 | QPREPQVCTL PPSREEMTKN QVSLSCAVKG FYPSDIAVEW ESNGQPENNY |
| 301 | KTTPPVLDSD GSFFLVSKLT VDKSRWQQGN VFSCSVMHEA LHNHYTQKSL |
| 351 | SLSPGK |

[0802] The leader sequence and linker sequence are underlined. To guide heterodimer formation with the ENG(26-346)-Fc fusion polypeptide of SEQ ID NOs 801 and 802 above, four amino acid substitutions can be introduced into the Fc domain of the ALK2 fusion polypeptide as indicated by double underline above. The amino acid sequence of SEQ ID NO: 805 may optionally be provided with the lysine removed from the C-terminus.

[0803] A processed ALK2-Fc fusion protein sequence (SEQ ID NO: 806) is as follows and may optionally be provided with the lysine removed from the C-terminus.

| (SEQ ID NO: 806) | |
|---|---|
| 1 | MEDEKPKVNP KLYMCVCEGL SCGNEDHCEG QQCFSSLSIN DGFHVYQKGC |
| 51 | FQVYEQGKMT CKTPPSPGQA VECCQGDWCN RNITAQLPTK GKSFPGTQNF |
| 101 | HLETGGGTHT CPPCPAPELL GGPSVFLFPP KPKDTLMISR TPEVTCVVVD |
| 151 | VSHEDPEVKF NWYVDGVEVH NAKTKPREEQ YNSTYRVVSV LTVLHQDWLN |
| 201 | GKEYKCKVSN KALPAPIEKT ISKAKGQPRE PQVCTLPPSR EEMTKNQVSL |
| 251 | SCAVKGFYPS DIAVEWESNG QPENNYKTTP PVLDSDGSFF LVSKLTVDKS |
| 301 | RWQQGNVFSC SVMHEALHNH YTQKSLSLSP GK |

[0804] The ENG(26-346)-Fc and ALK2-Fc proteins of SEQ ID NO: 802 and SEQ ID NO: 806, respectively, may be co-expressed and purified from a CHO cell line, to give rise to a heteromeric complex comprising ENG(26-346)-Fc:ALK2-Fc.

[0805] Purification of various ENG(26-346)-Fc:ALK2-Fc complexes could be achieved by a series of column chromatography steps, including, for example, three or more of the following, in any order: protein A chromatography, Q sepharose chromatography, phenylsepharose chromatography, size exclusion chromatography, cation exchange chromatography, and epitope-based affinity chromatography (e.g., with an antibody or functionally equivalent ligand directed against an epitope on ENG or ALK2), and multimodal chromatography (e.g., with resin containing both electrostatic and hydrophobic ligands). The purification could be completed with viral filtration and buffer exchange.

### Example 4. Exemplary Co-Receptor Polypeptide Elements of Heteromeric Fusion Proteins

[0806] Additional heteromeric fusion proteins can be generated which comprise at least one co-receptor polypeptide and at least one type I receptor polypeptide or one type II receptor polypeptide. Exemplary co-receptor polypeptides for such heteromeric fusion protein complexes are provided herein as soluble fragments of TGFβ superfamily co-receptors whose NCBI Reference Sequence numbers are indicated in FIGS. 11A and 11B. An individual co-receptor isoform can give rise to multiple exemplary polypeptides of different lengths as shown in FIGS. 11A and 11B.

[0807] A soluble heteromultimer can be generated comprising a soluble human co-receptor polypeptide, or fragment thereof, and an extracellular domain, or fragment thereof, of a human type I or type II receptor, which are each fused to an Fc domain with optionally a linker positioned between the non-Fc polypeptide and the Fc domain to yield a co-receptor-Fc:receptor-Fc protein complex. A methodology for promoting formation of desirable heteromultimers, as opposed to unwanted homomultimers, is to introduce alterations in the amino acid sequence of the Fc domains to guide the formation of asymmetric heteromultimers. Many different approaches to making asymmetric interaction pairs using Fc domains are described in this disclosure.

1. A recombinant heteromultimer comprising a TGF-beta superfamily co-receptor polypeptide and a TGF-beta superfamily type I receptor polypeptide, wherein the TGF-beta superfamily co-receptor polypeptide is endoglin, and wherein the TGF-beta superfamily type I receptor is ALK1.

2-213. (canceled)

214. The recombinant heteromultimer of claim 1, wherein the ALK1 polypeptide is selected from the group consisting of:
a) a polypeptide that is at least 70%, 75%, 80%, 85%, 90%, 91%, 92%, 93%, 94%, 95%, 96%, 97%, 98%, 99%, or 100% identical to the amino acid sequence of SEQ ID NOs: 14 or 15;
b) a polypeptide that is at least 70%, 75%, 80%, 85%, 90%, 91%, 92%, 93%, 94%, 95%, 96%, 97%, 98%, 99%, or 100% identical to a polypeptide that begins at any one of amino acids of 22-34 (e.g., amino acid residues 22, 23, 24, 25, 26, 27, 28, 29, 30, 31, 32, 33, or 34) of SEQ ID NO: 14, and ends at any one of amino acids 95-118 (e.g., amino acid residues 95, 96, 97, 98, 99, 100, 101, 102, 103, 104, 105, 106, 107, 108, 109, 110, 111, 112, 113, 114, 115, 116, 117, 118, or 119) of SEQ ID NO: 14;
c) a polypeptide that is at least 70%, 75%, 80%, 85%, 90%, 91%, 92%, 93%, 94%, 95%, 96%, 97%, 98%, 99%, or 100% identical to amino acids of 22-118 of SEQ ID NO: 14; and
d) a polypeptide that is at least 70%, 75%, 80%, 85%, 90%, 91%, 92%, 93%, 94%, 95%, 96%, 97%, 98%, 99%, or 100% identical to amino acids of 34-95 of SEQ ID NO: 14.

215-226. (canceled)

227. The recombinant heteromultimer of claim 1, wherein the endoglin polypeptide is selected from the group consisting of:
a) a polypeptide that is at least 70%, 75%, 80%, 85%, 90%, 91%, 92%, 93%, 94%, 95%, 96%, 97%, 98%, 99%, or 100% identical to the amino acid sequence of SEQ ID NOs: 501, 502, 505, 506, 509, 510, or 593;
b) polypeptide that is at least 70%, 75%, 80%, 85%, 90%, 91%, 92%, 93%, 94%, 95%, 96%, 97%, 98%, 99%, or 100% identical to a polypeptide that begins at any one of amino acids of 26-30 (e.g., amino acid residues 26, 27, 28, 29, or 30) of SEQ ID NO: 501, and ends at any one of amino acids 330-346 (e.g., amino acid residues 330, 331, 332, 333, 334, 335, 336, 337, 338, 339, 340, 341, 342, 343, 344, 345, or 346) of SEQ ID NO: 501;
c) a polypeptide that is at least 70%, 75%, 80%, 85%, 90%, 91%, 92%, 93%, 94%, 95%, 96%, 97%, 98%, 99%, or 100% identical to amino acids of 30-330 of SEQ ID NO: 501;
d) a polypeptide that is at least 70%, 75%, 80%, 85%, 90%, 91%, 92%, 93%, 94%, 95%, 96%, 97%, 98%, 99%, or 100% identical to a polypeptide that begins at any one of amino acids of 26-30 (e.g., amino acid residues 26, 27, 28, 29, or 30) of SEQ ID NO: 505, and ends at any one of amino acids 330-346 (e.g., amino acid residues 330, 331, 332, 333, 334, 335, 336, 337, 338, 339, 340, 341, 342, 343, 344, 345, or 346) of SEQ ID NO: 505;
e) a polypeptide that is at least 70%, 75%, 80%, 85%, 90%, 91%, 92%, 93%, 94%, 95%, 96%, 97%, 98%, 99%, or 100% identical to amino acids of 30-330 of SEQ ID NO: 505;
f) a polypeptide that is at least 70%, 75%, 80%, 85%, 90%, 91%, 92%, 93%, 94%, 95%, 96%, 97%, 98%, 99%, or 100% identical to a polypeptide that begins at any one of amino acids of 1-25 (e.g., amino acid residues 1, 2, 3, 4, 5, 6, 7, 8, 9, 10, 11, 12, 13, 14, 15, 16, 17, 18, 19, 20, 21, 22, 23, 24, or 25) of SEQ ID NO: 509, and ends at any one of amino acids 148-164 (e.g., amino acid residues 148, 149, 150, 151, 152, 153, 154, 155, 156, 157, 158, 159, 160, 161, 162, 163, or 164) of SEQ ID NO: 509;
g) a polypeptide that is at least 70%, 75%, 80%, 85%, 90%, 91%, 92%, 93%, 94%, 95%, 96%, 97%, 98%, 99%, or 100% identical to amino acids of 25-148 of SEQ ID NO: 509;
h) a polypeptide that is at least 70%, 75%, 80%, 85%, 90%, 91%, 92%, 93%, 94%, 95%, 96%, 97%, 98%, 99%, or 100% identical to a polypeptide that begins at any one of amino acids of 26-30 (e.g., amino acid residues 26, 27, 28, 29, or 30) of SEQ ID NO: 501, and ends at any one of amino acids 582-586 (e.g., amino acid residues 582, 583, 584, 585, or 586) of SEQ ID NO: 501;
i) a polypeptide that is at least 70%, 75%, 80%, 85%, 90%, 91%, 92%, 93%, 94%, 95%, 96%, 97%, 98%, 99%, or 100% identical to amino acids of 26-586 of SEQ ID NO: 501;
j) a polypeptide that is at least 70%, 75%, 80%, 85%, 90%, 91%, 92%, 93%, 94%, 95%, 96%, 97%, 98%, 99%, or 100% identical to amino acids of 30-582 of SEQ ID NO: 501;
k) a polypeptide that is at least 70%, 75%, 80%, 85%, 90%, 91%, 92%, 93%, 94%, 95%, 96%, 97%, 98%, 99%, or 100% identical to a polypeptide that begins at any one of amino acids of 26-30 (e.g., amino acid residues 26, 27, 28, 29, or 30) of SEQ ID NO: 505, and ends at any one of amino acids 582-586 (e.g., amino acid residues 582, 583, 584, 585, or 586) of SEQ ID NO: 505;
l) a polypeptide that is at least 70%, 75%, 80%, 85%, 90%, 91%, 92%, 93%, 94%, 95%, 96%, 97%, 98%, 99%, or 100% identical to amino acids of 26-586 of SEQ ID NO: 505;
m) a polypeptide that is at least 70%, 75%, 80%, 85%, 90%, 91%, 92%, 93%, 94%, 95%, 96%, 97%, 98%, 99%, or 100% identical to amino acids of 30-582 of SEQ ID NO: 505;
n) a polypeptide that is at least 70%, 75%, 80%, 85%, 90%, 91%, 92%, 93%, 94%, 95%, 96%, 97%, 98%, 99%, or 100% identical to a polypeptide that begins at any one of amino acids of 1-25 (e.g., amino acid residues 1, 2, 3, 4, 5, 6, 7, 8, 9, 10, 11, 12, 13, 14, 15, 16, 17, 18, 19, 20, 21, 22, 23, 24, or 25) of SEQ ID NO: 509, and ends at any one of amino acids 400-404 (e.g., amino acid residues 401, 402, 403, or 404) of SEQ ID NO: 509;
o) a polypeptide that is at least 70%, 75%, 80%, 85%, 90%, 91%, 92%, 93%, 94%, 95%, 96%, 97%, 98%, 99%, or 100% identical to amino acids of 1-404 of SEQ ID NO: 509; and
p) a polypeptide that is at least 70%, 75%, 80%, 85%, 90%, 91%, 92%, 93%, 94%, 95%, 96%, 97%, 98%, 99%, or 100% identical to amino acids of 25-400 of SEQ ID NO: 509.

228-238. (canceled)

239. The recombinant heteromultimer of claim 1, wherein the TGF-beta superfamily type I receptor polypeptide is a fusion protein further comprising a heterologous polypeptide domain, and wherein the heterologous polypeptide domain is a first or second member of an interaction pair.

240. (canceled)

241. The recombinant heteromultimer of claim 1, wherein the TGF-beta superfamily co-receptor polypeptide is a fusion protein further comprising a heterologous polypeptide domain, and wherein the heterologous polypeptide domain is a first or second member of an interaction pair.

242. The recombinant heteromultimer of claim 1, wherein the heterologous polypeptide domain comprises a constant region from an IgG heavy chain.

243. The recombinant heteromultimer of claim 242, wherein the constant region from an IgG heavy chain is an immunoglobulin Fc domain.

244. (canceled)

245. The recombinant heteromultimer of claim 242, wherein the constant region from an IgG heavy chain comprises one or more amino acid mutations (e.g., amino acid additions, deletions, or substitutions) that promote heteromultimer formation, and/or inhibit homomultimer formation.

246-252. (canceled)

253. The recombinant heteromultimer of claim 239, wherein the fusion protein comprises a linker domain positioned between the TGF-beta superfamily receptor polypeptide (e.g., TGF-beta superfamily type I receptor polypeptide, and/or TGF-beta superfamily co-receptor polypeptide) and the heterologous polypeptide domain.

254. (canceled)

255. The recombinant heteromultimer of claim 1, wherein the TGF-beta superfamily type I receptor polypeptide and/or TGF-beta superfamily co-receptor polypeptide comprises one or more amino acid modifications selected from the group consisting of: a glycosylated amino acid, a PEGylated amino acid, a farnesylated amino acid, an acetylated amino acid, a biotinylated amino acid, and an amino acid conjugated to a lipid moiety.

256. The recombinant heteromultimer of claim 1, wherein the TGF-beta superfamily type I receptor polypeptide and/or TGF-beta superfamily co-receptor polypeptide is glycosylated and has a glycosylation pattern obtainable from expression of the TGF-beta superfamily type I receptor polypeptide, TGF-beta superfamily type II receptor polypeptide, and/or TGF-beta superfamily co-receptor polypeptide in a CHO cell.

257-258. (canceled)

259. The recombinant heteromultimer of claim 1, wherein the recombinant heteromultimer binds to and/or inhibits BMP9 and/or BMP10.

260-264. (canceled)

265. The recombinant heteromultimer of claim 1, wherein the heteromultimer is an endoglin-Fc:ALK1-Fc heterodimer.

266. A pharmaceutical preparation comprising the recombinant heteromultimer of claim 1 and a pharmaceutically acceptable carrier.

267. The pharmaceutical preparation of claim 266, wherein the pharmaceutical preparation comprises less than about 10%, 9%, 8%, 7%, 6%, 5%, 4%, 3%, 2%, or less than about 1% TGF-beta type 1 receptor homomultimers and/or TGF-beta co-receptor homomultimers.

268-322. (canceled)

323. The recombinant heteromultimer of claim 1, wherein the endoglin:ALK1 heteromultimer comprises a polypeptide that is at least 90% identical to a polypeptide that begins at any one of amino acids of 22-34 of SEQ ID NO: 14 and ends at any one of amino acids 95-118 of SEQ ID NO: 14.

324. The recombinant heteromultimer of claim 1, wherein the endoglin:ALK1 heteromultimer comprises a polypeptide that is at least 90% identical to a polypeptide that begins at any one of amino acids of 26-30 of SEQ ID NO: 501, and ends at any one of amino acids 330-346 of SEQ ID NO: 501.

325. The recombinant heteromultimer of claim 1, wherein the endoglin:ALK1 heteromultimer comprises a polypeptide that is at least 90% identical to a polypeptide that begins at any one of amino acids of 22-34 of SEQ ID NO: 14 and ends at any one of amino acids 95-118 of SEQ ID NO: 14; and wherein the endoglin:ALK1 heteromultimer comprises a polypeptide that is at least 90% identical to a polypeptide that begins at any one of amino acids of 26-30 of SEQ ID NO: 501, and ends at any one of amino acids 330-346 of SEQ ID NO: 501.

326. The recombinant heteromultimer of claim 1, wherein the endoglin:ALK1 heteromultimer comprises a polypeptide that is at least 95% identical to a polypeptide that begins at any one of amino acids of 22-34 of SEQ ID NO: 14 and ends at any one of amino acids 95-118 of SEQ ID NO: 14; and wherein the endoglin:ALK1 heteromultimer comprises a polypeptide that is at least 95% identical to a polypeptide that begins at any one of amino acids of 26-30 of SEQ ID NO: 501, and ends at any one of amino acids 330-346 of SEQ ID NO: 501.

327. The recombinant heteromultimer of claim 1, wherein the endoglin:ALK1 heteromultimer comprises a polypeptide that begins at any one of amino acids of 22-34 of SEQ ID NO: 14 and ends at any one of amino acids 95-118 of SEQ ID NO: 14; and wherein the endoglin:ALK1 heteromultimer comprises a polypeptide that begins at any one of amino acids of 26-30 of SEQ ID NO: 501, and ends at any one of amino acids 330-346 of SEQ ID NO: 501.

The application's sequence listing, which the Patent Office published only in electronic form, follows.

SEQUENCE LISTING (822 sequences)

SEQ ID NO: 1 - protein, 512 aa, Homo sapiens
MTAPWVALALLWGSLCAGSGRGEAETRECIYYNANWELERTNQSGLERCEGEQDKRLHCYASWRNSSGTIELVKKGCWLDDFNCYDRQECVATEENPQVYFCCCEGNFCNERFTHLPEAGGPEVTYEPPPTAPTLLTVLAYSLLPIGGLSLIVLLAFWMYRHRKPPYGHVDIHEDPGPPPPSPLVGLKPLQLLEIKARGRFGCVWKAQLMNDFVAVKIFPLQDKQSWQSEREIFSTPGMKHENLLQFIAAEKRGSNLEVELWLITAFHDKGSLTDYLKGNIITWNELCHVAETMSRGLSYLHEDVPWCRGEGHKPSIAHRDFKSKNVLLKSDLTAVLADFGLAVRFEPGKPPGDTHGQVGTRRYMAPEVLEGAINFQRDAFLRIDMYAMGLVLWELVSRCKAADGPVDEYMLPFEEEIGQHPSLEELQEVVVHKKMRPTIKDHWLKHPGLAQLCVTIEECWDHDAEARLSAGCVEERVSLIRRSVNGTTSDCLVSLVTSVTNVDLPPKESSI

SEQ ID NO: 2 - protein, 115 aa, Homo sapiens
GRGEAETRECIYYNANWELERTNQSGLERCEGEQDKRLHCYASWRNSSGTIELVKKGCWLDDFNCYDRQECVATEENPQVYFCCCEGNFCNERFTHLPEAGGPEVTYEPPPTAPT

SEQ ID NO: 3 - protein, 100 aa, Homo sapiens
GRGEAETRECIYYNANWELERTNQSGLERCEGEQDKRLHCYASWRNSSGTIELVKKGCWLDDFNCYDRQECVATEENPQVYFCCCEGNFCNERFTHLPEA

SEQ ID NO: 4 - protein, 512 aa, Homo sapiens
MTAPWVALALLWGSLCAGSGRGEAETRECIYYNANWELERTNQSGLERCEGEQDKRLHCYASWANSSGTIELVKKGCWLDDFNCYDRQECVATEENPQVYFCCCEGNFCNERFTHLPEAGGPEVTYEPPPTAPTLLTVLAYSLLPIGGLSLIVLLAFWMYRHRKPPYGHVDIHEDPGPPPPSPLVGLKPLQLLEIKARGRFGCVWKAQLMNDFVAVKIFPLQDKQSWQSEREIFSTPGMKHENLLQFIAAEKRGSNLEVELWLITAFHDKGSLTDYLKGNIITWNELCHVAETMSRGLSYLHEDVPWCRGEGHKPSIAHRDFKSKNVLLKSDLTAVLADFGLAVRFEPGKPPGDTHGQVGTRRYMAPEVLEGAINFQRDAFLRIDMYAMGLVLWELVSRCKAADGPVDEYMLPFEEEIGQHPSLEELQEVVVHKKMRPTIKDHWLKHPGLAQLCVTIEECWDHDAEARLSAGCVEERVSLIRRSVNGTTSDCLVSLVTSVTNVDLPPKESSI

SEQ ID NO: 5 - protein, 115 aa, Homo sapiens
GRGEAETRECIYYNANWELERTNQSGLERCEGEQDKRLHCYASWANSSGTIELVKKGCWLDDFNCYDRQECVATEENPQVYFCCCEGNFCNERFTHLPEAGGPEVTYEPPPTAPT

SEQ ID NO: 6 - protein, 100 aa, Homo sapiens
GRGEAETRECIYYNANWELERTNQSGLERCEGEQDKRLHCYASWANSSGTIELVKKGCWLDDFNCYDRQECVATEENPQVYFCCCEGNFCNERFTHLPEA

SEQ ID NO: 7 - DNA, 1536 bp, Homo sapiens
atgacggcgccctgggtggccctcgccctcctctggggatcgctgtgcgccggctctgggcgtggggaggctgagacacgggagtgcatctactacaacgccaactgggagctggagcgcaccaaccagagcggcctggagcgctgcgaaggcgagcaggacaagcggctgcactgctacgcctcctggcgcaacagctctggcaccatcgagctcgtgaagaagggctgctggctagatgacttcaactgctacgataggcaggagtgtgtggccactgaggagaacccccaggtgtacttctgctgctgtgaaggcaacttctgcaacgaacgcttcactcatttgccagaggctgggggcccggaagtcacgtacgagccacccccgacagcccccaccctgctcacggtgctggcctactcactgctgcccatcgggggcctttccctcatcgtcctgctggccttttggatgtaccggcatcgcaagcccccctacggtcatgtggacatccatgaggaccctgggcctccaccaccatcccctctggtgggcctgaagccactgcagctgctggagatcaaggctcgggggcgctttggctgtgtctggaaggcccagctcatgaatgactttgtagctgtcaagatcttcccactccaggacaagcagtcgtggcagagtgaacgggagatcttcagcacacctggcatgaagcacgagaacctgctacagttcattgctgccgagaagcgaggctccaacctcgaagtagagctgtggctcatcacggccttccatgacaagggctccctcacggattacctcaaggggaacatcatcacatggaacgaactgtgtcatgtagcagagacgatgtcacgaggcctctcatacctgcatgaggatgtgccctggtgccgtggcgagggccacaagccgtctattgcccacagggactttaaaagtaagaatgtattgctgaagagcgacctcacagccgtgctggctgactttggcttggctgttcgatttgagccagggaaacctccaggggacacccacggacaggtaggcacgagacggtacatggctcctgaggtgctcgagggagccatcaacttccagagagatgccttcctgcgcattgacatgtatgccatggggttggtgctgtgggagcttgtgtctcgctgcaaggctgcagacggacccgtggatgagtacatgctgccctttgaggaagagattggccagcacccttcgttggaggagctgcaggaggtggtggtgcacaagaagatgaggcccaccattaaagatcactggttgaaacacccgggcctggcccagctttgtgtgaccatcgaggagtgctgggaccatgatgcagaggctcgcttgtccgcgggctgtgtggaggagcgggtgtccctgattcggaggtcggtcaacggcactacctcggactgtctcgtttccctggtgacctctgtcaccaatgtggacctgccccctaaagagtcaagcatc

SEQ ID NO: 8 - DNA, 345 bp, Homo sapiens
gggcgtggggaggctgagacacgggagtgcatctactacaacgccaactgggagctggagcgcaccaaccagagcggcctggagcgctgcgaaggcgagcaggacaagcggctgcactgctacgcctcctggcgcaacagctctggcaccatcgagctcgtgaagaagggctgctggctagatgacttcaactgctacgataggcaggagtgtgtggccactgaggagaacccccaggtgtacttctgctgctgtgaaggcaacttctgcaacgaacgcttcactcatttgccagaggctgggggcccggaagtcacgtacgagccacccccgacagcccccacc

SEQ ID NO: 9 - protein, 513 aa, Homo sapiens
MGAAAKLAFAVFLISCSSGAILGRSETQECLFFNANWEKDRTNQTGVEPCYGDKDKRRHCFATWKNISGSIEIVKQGCWLDDINCYDRTDCVEKKDSPEVYFCCCEGNMCNEKFSYFPEMEVTQPTSNPVTPKPPYYNILLYSLVPLMLIAGIVICAFWVYRHHKMAYPPVLVPTQDPGPPPPSPLLGLKPLQLLEVKARGRFGCVWKAQLLNEYVAVKIFPIQDKQSWQNEYEVYSLPGMKHENILQFIGAEKRGTSVDVDLWLITAFHEKGSLSDFLKANVVSWNELCHIAETMARGLAYLHEDIPGLKDGHKPAISHRDIKSKNVLLKNNLTACIADFGLALKFEAGKSAGDTHGQVGTRRYMAPEVLEGAINFQRDAFLRIDMYAMGLVLWELASRCTAADGPVDEYMLPFEEEIGQHPSLEDMQEVVVHKKKRPVLRDYWQKHAGMAMLCETIEECWDHDAEARLSAGCVGERITQMQRLTNIITTEDIVTVVTMVTNVDFPPKESSL

SEQ ID NO: 10 - protein, 115 aa, Homo sapiens
ILGRSETQECLFFNANWEKDRTNQTGVEPCYGDKDKRRHCFATWKNISGSIEIVKQGCWLDDINCYDRTDCVEKKDSPEVYFCCCEGNMCNEKFSYFPEMEVTQPTSNPVTPKPP

SEQ ID NO: 11 - protein, 100 aa, Homo sapiens
ILGRSETQECLFFNANWEKDRTNQTGVEPCYGDKDKRRHCFATWKNISGSIEIVKQGCWLDDINCYDRTDCVEKKDSPEVYFCCCEGNMCNEKFSYFPEM

SEQ ID NO: 12 - DNA, 1539 bp, Homo sapiens
atgggagctgctgcaaagttggcgtttgccgtctttcttatctcctgttcttcaggtgctatacttggtagatcagaaactcaggagtgtcttttctttaatgctaattgggaaaaagacagaaccaatcaaactggtgttgaaccgtgttatggtgacaaagataaacggcggcattgttttgctacctggaagaatatttctggttccattgaaatagtgaaacaaggttgttggctggatgatatcaactgctatgacaggactgattgtgtagaaaaaaaagacagccctgaagtatatttttgttgctgtgagggcaatatgtgtaatgaaaagttttcttattttccggagatggaagtcacacagcccacttcaaatccagttacacctaagccaccctattacaacatcctgctctattccttggtgccacttatgttaattgcggggattgtcatttgtgcattttgggtgtacaggcatcacaagatggcctaccctcctgtacttgttccaactcaagacccaggaccacccccaccttctccattactaggtttgaaaccactgcagttattagaagtgaaagcaaggggaagatttggttgtgtctggaaagcccagttgcttaacgaatatgtggctgtcaaaatatttccaatacaggacaaacagtcatggcaaaatgaatacgaagtctacagtttgcctggaatgaagcatgagaacatattacagttcattggtgcagaaaaacgaggcaccagtgttgatgtggatctttggctgatcacagcatttcatgaaaagggttcactatcagactttcttaaggctaatgtggtctcttggaatgaactgtgtcatattgcagaaaccatggctagaggattggcatatttacatgaggatatacctggcctaaaagatggccacaaacctgccatatctcacagggacatcaaaagtaaaaatgtgctgttgaaaaacaacctgacagcttgcattgctgactttgggttggccttaaaatttgaggctggcaagtctgcaggcgatacccatggacaggttggtacccggaggtacatggctccagaggtattagagggtgctataaacttccaaagggatgcatttttgaggatagatatgtatgccatgggattagtcctatgggaactggcttctcgctgtactgctgcagatggacctgtagatgaatacatgttgccatttgaggaggaaattggccagcatccatctcttgaagacatgcaggaagttgttgtgcataaaaaaaagaggcctgttttaagagattattggcagaaacatgctggaatggcaatgctctgtgaaaccattgaagaatgttgggatcacgacgcagaagccaggttatcagctggatgtgtaggtgaaagaattacccagatgcagagactaacaaatattattaccacagaggacattgtaacagtggtcacaatggtgacaaatgttgactttcctcccaaagaatctagtcta

SEQ ID NO: 13 - DNA, 345 bp, Homo sapiens
atacttggtagatcagaaactcaggagtgtcttttctttaatgctaattgggaaaaagacagaaccaatcaaactggtgttgaaccgtgttatggtgacaaagataaacggcggcattgttttgctacctggaagaatatttctggttccattgaaatagtgaaacaaggttgttggctggatgatatcaactgctatgacaggactgattgtgtagaaaaaaaagacagccctgaagtatatttttgttgctgtgagggcaatatgtgtaatgaaaagttttcttattttccggagatggaagtcacacagcccacttcaaatccagttacacctaagccaccc

SEQ ID NO: 14 - protein, 503 aa, Homo sapiens
MTLGSPRKGLLMLLMALVTQGDPVKPSRGPLVTCTCESPHCKGPTCRGAWCTVVLVREEGRHPQEHRGCGNLHRELCRGRPTEFVNHYCCDSHLCNHNVSLVLEATQPPSEQPGTDGQLALILGPVLALLALVALGVLGLWHVRRRQEKQRGLHSELGESSLILKASEQGDSMLGDLLDSDCTTGSGSGLPFLVQRTVARQVALVECVGKGRYGEVWRGLWHGESVAVKIFSSRDEQSWFRETEIYNTVLLRHDNILGFIASDMTSRNSSTQLWLITHYHEHGSLYDFLQRQTLEPHLALRLAVSAACGLAHLHVEIFGTQGKPAIAHRDFKSRNVLVKSNLQCCIADLGLAVMHSQGSDYLDIGNNPRVGTKRYMAPEVLDEQIRTDCFESYKWTDIWAFGLVLWEIARRTIVNGIVEDYRPPFYDVVPNDPSFEDMKKVVCVDQQTPTIPNRLAADPVLSGLAQMMRECWYPNPSARLTALRIKKTLQKISNSPEKPKVIQ

SEQ ID NO: 15 - protein, 97 aa, Homo sapiens
DPVKPSRGPLVTCTCESPHCKGPTCRGAWCTVVLVREEGRHPQEHRGCGNLHRELCRGRPTEFVNHYCCDSHLCNHNVSLVLEATQPPSEQPGTDGQ

SEQ ID NO: 16 - DNA, 1509 bp, Homo sapiens
atgaccttgggctcccccaggaaaggccttctgatgctgctgatggccttggtgacccagggagaccctgtgaagccgtctcggggcccgctggtgacctgcacgtgtgagagcccacattgcaaggggcctacctgccggggggcctggtgcacagtagtgctggtgcgggaggaggggaggcacccccaggaacatcggggctgcgggaacttgcacagggagctctgcagggggcgccccaccgagttcgtcaaccactactgctgcgacagccacctctgcaaccacaacgtgtccctggtgctggaggccacccaacctccttcggagcagccgggaacagatggccagctggccctgatcctgggccccgtgctggccttgctggccctggtggccctgggtgtcctgggcctgtggcatgtccgacggaggcaggagaagcagcgtggcctgcacagcgagctgggagagtccagtctcatcctgaaagcatctgagcagggcgacagcatgttgggggacctcctggacagtgactgcaccacagggagtggctcagggctccccttcctggtgcagaggacagtggcacggcaggttgccttggtggagtgtgtgggaaaaggccgctatggcgaagtgtggcggggcttgtggcacggtgagagtgtggccgtcaagatcttctcctcgagggatgaacagtcctggttccgggagactgagatctataacacagtgttgctcagacacgacaacatcctaggcttcatcgcctcagacatgacctcccgcaactcgagcacgcagctgtggctcatcacgcactaccacgagcacggctccctctacgactttctgcagagacagacgctggagccccatctggctctgaggctagctgtgtccgcggcatgcggcctggcgcacctgcacgtggagatcttcggtacacagggcaaaccagccattgcccaccgcgacttcaagagccgcaatgtgctggtcaagagcaacctgcagtgttgcatcgccgacctgggcctggctgtgatgcactcacagggcagcgattacctggacatcggcaacaacccgagagtgggcaccaagcggtacatggcacccgaggtgctggacgagcagatccgcacggactgctttgagtcctacaagtggactgacatctgggcctttggcctggtgctgtgggagattgcccgccggaccatcgtgaatggcatcgtggaggactatagaccacccttctatgatgtggtgcccaatgaccccagctttgaggacatgaagaaggtggtgtgtgtggatcagcagacccccaccatccctaaccggctggctgcagacccggtcctctcaggcctagctcagatgatgcgggagtgctggtacccaaacccctctgcccgactcaccgcgctgcggatcaagaagacactacaaaaaattagcaacagtccagagaagcctaaagtgattcaa

SEQ ID NO: 17 - DNA, 291 bp, Homo sapiens
gaccctgtgaagccgtctcggggcccgctggtgacctgcacgtgtgagagcccacattgcaaggggcctacctgccggggggcctggtgcacagtagtgctggtgcgggaggaggggaggcacccccaggaacatcggggctgcgggaacttgcacagggagctctgcagggggcgccccaccgagttcgtcaaccactactgctgcgacagccacctctgcaaccacaacgtgtccctggtgctggaggccacccaacctccttcggagcagccgggaacagatggccag

SEQ ID NO: 18 - protein, 509 aa, Homo sapiens
MVDGVMILPVLIMIALPSPSMEDEKPKVNPKLYMCVCEGLSCGNEDHCEGQQCFSSLSINDGFHVYQKGCFQVYEQGKMTCKTPPSPGQAVECCQGDWCNRNITAQLPTKGKSFPGTQNFHLEVGLIILSVVFAVCLLACLLGVALRKFKRRNQERLNPRDVEYGTIEGLITTNVGDSTLADLLDHSCTSGSGSGLPFLVQRTVARQITLLECVGKGRYGEVWRGSWQGENVAVKIFSSRDEKSWFRETELYNTVMLRHENILGFIASDMTSRHSSTQLWLITHYHEMGSLYDYLQLTTLDTVSCLRIVLSIASGLAHLHIEIFGTQGKPAIAHRDLKSKNILVKKNGQCCIADLGLAVMHSQSTNQLDVGNNPRVGTKRYMAPEVLDETIQVDCFDSYKRVDIWAFGLVLWEVARRMVSNGIVEDYKPPFYDVVPNDPSFEDMRKVVCVDQQRPNIPNRWFSDPTLTSLAKLMKECWYQNPSARLTALRIKKTLTKIDNSLDKLKTDC

SEQ ID NO: 19 - protein, 103 aa, Homo sapiens
MEDEKPKVNPKLYMCVCEGLSCGNEDHCEGQQCFSSLSINDGFHVYQKGCFQVYEQGKMTCKTPPSPGQAVECCQGDWCNRNITAQLPTKGKSFPGTQNFHLE

SEQ ID NO: 20 - DNA, 1527 bp, Homo sapiens
atggtagatggagtgatgattcttcctgtgcttatcatgattgctctcccctcccctagtatggaagatgagaagcccaaggtcaaccccaaactctacatgtgtgtgtgtgaaggtctctcctgcggtaatgaggaccactgtgaaggccagcagtgcttttcctcactgagcatcaacgatggcttccacgtctaccagaaaggctgcttccaggtttatgagcagggaaagatgacctgtaagaccccgccgtcccctggccaagccgtggagtgctgccaaggggactggtgtaacaggaacatcacggcccagctgcccactaaaggaaaatccttccctggaacacagaatttccacttggaggttggcctcattattctctctgtagtgttcgcagtatgtcttttagcctgcctgctgggagttgctctccgaaaatttaaaaggcgcaaccaagaacgcctcaatccccgagacgtggagtatggcactatcgaagggctcatcaccaccaatgttggagacagcactttagcagatttattggatcattcgtgtacatcaggaagtggctctggtcttccttttctggtacaaagaacagtggctcgccagattacactgttggagtgtgtcgggaaaggcaggtatggtgaggtgtggaggggcagctggcaaggggagaatgttgccgtgaagatcttctcctcccgtgatgagaagtcatggttcagggaaacggaattgtacaacactgtgatgctgaggcatgaaaatatcttaggtttcattgcttcagacatgacatcaagacactccagtacccagctgtggttaattacacattatcatgaaatgggatcgttgtacgactatcttcagcttactactctggatacagttagctgccttcgaatagtgctgtccatagctagtggtcttgcacatttgcacatagagatatttgggacccaagggaaaccagccattgcccatcgagatttaaagagcaaaaatattctggttaagaagaatggacagtgttgcatagcagatttgggcctggcagtcatgcattcccagagcaccaatcagcttgatgtggggaacaatccccgtgtgggcaccaagcgctacatggcccccgaagttctagatgaaaccatccaggtggattgtttcgattcttataaaagggtcgatatttgggcctttggacttgttttgtgggaagtggccaggcggatggtgagcaatggtatagtggaggattacaagccaccgttctacgatgtggttcccaatgacccaagttttgaagatatgaggaaggtagtctgtgtggatcaacaaaggccaaacatacccaacagatggttctcagacccgacattaacctctctggccaagctaatgaaagaatgctggtatcaaaatccatccgcaagactcacagcactgcgtatcaaaaagactttgaccaaaattgataattccctcgacaaattgaaaactgactgt

SEQ ID NO: 21 - DNA, 309 bp, Homo sapiens
atggaagatgagaagcccaaggtcaaccccaaactctacatgtgtgtgtgtgaaggtctctcctgcggtaatgaggaccactgtgaaggccagcagtgcttttcctcactgagcatcaacgatggcttccacgtctaccagaaaggctgcttccaggtttatgagcagggaaagatgacctgtaagaccccgccgtcccctggccaagccgtggagtgctgccaaggggactggtgtaacaggaacatcacggcccagctgcccactaaaggaaaatccttccctggaacacagaatttccacttggag

SEQ ID NO: 22 - protein, 532 aa, Homo sapiens
MPQLYIYIRLLGAYLFIISRVQGQNLDSMLHGTGMKSDSDQKKSENGVTLAPEDTLPFLKCYCSGHCPDDAINNTCITNGHCFAIIEEDDQGETTLASGCMKYEGSDFQCKDSPKAQLRRTIECCRTNLCNQYLQPTLPPVVIGPFFDGSIRWLVLLISMAVCIIAMIIFSSCFCYKHYCKSISSRRRYNRDLEQDEAFIPVGESLKDLIDQSQSSGSGSGLPLLVQRTIAKQIQMVRQVGKGRYGEVWMGKWRGEKVAVKVFFTTEEASWFRETEIYQTVLMRHENILGFIAADIKGTGSWTQLYLITDYHENGSLYDFLKCATLDTRALLKLAYSAACGLCHLHTEIYGTQGKPAIAHRDLKSKNILIKKNGSCCIADLGLAVKFNSDTNEVDVPLNTRVGTKRYMAPEVLDESLNKNHFQPYIMADIYSFGLIIWEMARRCITGGIVEEYQLPYYNMVPSDPSYEDMREVVCVKRLRPIVSNRWNSDECLRAVLKLMSECWAHNPASRLTALRIKKTLAKMVESQDVKI

SEQ ID NO: 23 - protein, 129 aa, Homo sapiens
QNLDSMLHGTGMKSDSDQKKSENGVTLAPEDTLPFLKCYCSGHCPDDAINNTCITNGHCFAIIEEDDQGETTLASGCMKYEGSDFQCKDSPKAQLRRTIECCRTNLCNQYLQPTLPPVVIGPFFDGSIR

SEQ ID NO: 24 - DNA, 1596 bp, Homo sapiens
atgcctcagctatacatttacatcagattattgggagcctatttgttcatcatttctcgtgttcaaggacagaatctggatagtatgcttcatggcactgggatgaaatcagactccgaccagaaaaagtcagaaaatggagtaaccttagcaccagaggataccttgccttttttaaagtgctattgctcagggcactgtccagatgatgctattaataacacatgcataactaatggacattgctttgccatcatagaagaagatgaccagggagaaaccacattagcttcagggtgtatgaaatatgaaggatctgattttcagtgcaaagattctccaaaagcccagctacgccggacaatagaatgttgtcggaccaatttatgtaaccagtatttgcaacccacactgccccctgttgtcataggtccgttttttgatggcagcattcgatggctggttttgctcatttctatggctgtctgcataattgctatgatcatcttctccagctgcttttgttacaaacattattgcaagagcatctcaagcagacgtcgttacaatcgtgatttggaacaggatgaagcatttattccagttggagaatcactaaaagaccttattgaccagtcacaaagttctggtagtgggtctggactacctttattggttcagcgaactattgccaaacagattcagatggtccggcaagttggtaaaggccgatatggagaagtatggatgggcaaatggcgtggcgaaaaagtggcggtgaaagtattctttaccactgaagaagccagctggtttcgagaaacagaaatctaccaaactgtgctaatgcgccatgaaaacatacttggtttcatagcggcagacattaaaggtacaggttcctggactcagctctatttgattactgattaccatgaaaatggatctctctatgacttcctgaaatgtgctacactggacaccagagccctgcttaaattggcttattcagctgcctgtggtctgtgccacctgcacacagaaatttatggcacccaaggaaagcccgcaattgctcatcgagacctaaagagcaaaaacatcctcatcaagaaaaatgggagttgctgcattgctgacctgggccttgctgttaaattcaacagtgacacaaatgaagttgatgtgcccttgaataccagggtgggcaccaaacgctacatggctcccgaagtgctggacgaaagcctgaacaaaaaccacttccagccctacatcatggctgacatctacagcttcggcctaatcatttgggagatggctcgtcgttgtatcacaggagggatcgtggaagaataccaattgccatattacaacatggtaccgagtgatccgtcatacgaagatatgcgtgaggttgtgtgtgtcaaacgtttgcggccaattgtgtctaatcggtggaacagtgatgaatgtctacgagcagttttgaagctaatgtcagaatgctgggcccacaatccagcctccagactcacagcattgagaattaagaagacgcttgccaagatggttgaatcccaagatgtaaaaatc

SEQ ID NO: 25 - DNA, 387 bp, Homo sapiens
cagaatctggatagtatgcttcatggcactgggatgaaatcagactccgaccagaaaaagtcagaaaatggagtaaccttagcaccagaggataccttgccttttttaaagtgctattgctcagggcactgtccagatgatgctattaataacacatgcataactaatggacattgctttgccatcatagaagaagatgaccagggagaaaccacattagcttcagggtgtatgaaatatgaaggatctgattttcagtgcaaagattctccaaaagcccagctacgccggacaatagaatgttgtcggaccaatttatgtaaccagtatttgcaacccacactgccccctgttgtcataggtccgttttttgatggcagcattcga

SEQ ID NO: 26 - protein, 505 aa, Homo sapiens
MAESAGASSFFPLVVLLLAGSGGSGPRGVQALLCACTSCLQANYTCETDGACMVSIFNLDGMEHHVRTCIPKVELVPAGKPFYCLSSEDLRNTHCCYTDYCNRIDLRVPSGHLKEPEHPSMWGPVELVGIIAGPVFLLFLIIIIVFLVINYHQRVYHNRQRLDMEDPSCEMCLSKDKTLQDLVYDLSTSGSGSGLPLFVQRTVARTIVLQEIIGKGRFGEVWRGRWRGGDVAVKIFSSREERSWFREAEIYQTVMLRHENILGFIAADNKDNGTWTQLWLVSDYHEHGSLFDYLNRYTVTIEGMIKLALSAASGLAHLHMEIVGTQGKPGIAHRDLKSKNILVKKNGMCAIADLGLAVRHDAVTDTIDIAPNQRVGTKRYMAPEVLDETINMKHFDSFKCADIYALGLVYWEIARRCNSGGVHEEYQLPYYDLVPSDPSIEEMRKVVCDQKLRPNIPNWWQSYEALRVMGKMMRECWYANGAARLTALRIKKTLSQLSVQEDVKI

SEQ ID NO: 27 - protein, 103 aa, Homo sapiens
SGPRGVQALLCACTSCLQANYTCETDGACMVSIFNLDGMEHHVRTCIPKVELVPAGKPFYCLSSEDLRNTHCCYTDYCNRIDLRVPSGHLKEPEHPSMWGPVE

SEQ ID NO: 28 - DNA, 1515 bp, Homo sapiens
atggcggagtcggccggagcctcctccttcttcccccttgttgtcctcctgctcgccggcagcggcgggtccgggccccggggggtccaggctctgctgtgtgcgtgcaccagctgcctccaggccaactacacgtgtgagacagatggggcctgcatggtttccattttcaatctggatgggatggagcaccatgtgcgcacctgcatccccaaagtggagctggtccctgccgggaagcccttctactgcctgagctcggaggacctgcgcaacacccactgctgctacactgactactgcaacaggatcgacttgagggtgcccagtggtcacctcaaggagcctgagcacccgtccatgtggggcccggtggagctggtaggcatcatcgccggcccggtgttcctcctgttcctcatcatcatcattgttttccttgtcattaactatcatcagcgtgtctatcacaaccgccagagactggacatggaagatccctcatgtgagatgtgtctctccaaagacaagacgctccaggatcttgtctacgatctctccacctcagggtctggctcagggttacccctctttgtccagcgcacagtggcccgaaccatcgttttacaagagattattggcaagggtcggtttggggaagtatggcggggccgctggaggggtggtgatgtggctgtgaaaatattctcttctcgtgaagaacggtcttggttcagggaagcagagatataccagacggtcatgctgcgccatgaaaacatccttggatttattgctgctgacaataaagataatggcacctggacacagctgtggcttgtttctgactatcatgagcacgggtccctgtttgattatctgaaccggtacacagtgacaattgaggggatgattaagctggccttgtctgctgctagtgggctggcacacctgcacatggagatcgtgggcacccaagggaagcctggaattgctcatcgagacttaaagtcaaagaacattctggtgaagaaaaatggcatgtgtgccatagcagacctgggcctggctgtccgtcatgatgcagtcactgacaccattgacattgccccgaatcagagggtggggaccaaacgatacatggcccctgaagtacttgatgaaaccattaatatgaaacactttgactcctttaaatgtgctgatatttatgccctcgggcttgtatattgggagattgctcgaagatgcaattctggaggagtccatgaagaatatcagctgccatattacgacttagtgccctctgacccttccattgaggaaatgcgaaaggttgtatgtgatcagaagctgcgtcccaacatccccaactggtggcagagttatgaggcactgcgggtgatggggaagatgatgcgagagtgttggtatgccaacggcgcagcccgcctgacggccctgcgcatcaagaagaccctctcccagctcagcgtgcaggaagacgtgaagatc

SEQ ID NO: 29 - DNA, 309 bp, Homo sapiens
tccgggccccggggggtccaggctctgctgtgtgcgtgcaccagctgcctccaggccaactacacgtgtgagacagatggggcctgcatggtttccattttcaatctggatgggatggagcaccatgtgcgcacctgcatccccaaagtggagctggtccctgccgggaagcccttctactgcctgagctcggaggacctgcgcaacacccactgctgctacactgactactgcaacaggatcgacttgagggtgcccagtggtcacctcaaggagcctgagcacccgtccatgtggggcccggtggag

SEQ ID NO: 30 - protein, 503 aa, Homo sapiens
MEAAVAAPRPRLLLLVLAAAAAAAAALLPGATALQCFCHLCTKDNFTCVTDGLCFVSVTETTDKVIHNSMCIAEIDLIPRDRPFVCAPSSKTGSVTTTYCCNQDHCNKIELPTTVKSSPGLGPVELAAVIAGPVCFVCISLMLMVYICHNRTVIHHRVPNEEDPSLDRPFISEGTTLKDLIYDMTTSGSGSGLPLLVQRTIARTIVLQESIGKGRFGEVWRGKWRGEEVAVKIFSSREERSWFREAEIYQTVMLRHENILGFIAADNKDNGTWTQLWLVSDYHEHGSLFDYLNRYTVTVEGMIKLALSTASGLAHLHMEIVGTQGKPAIAHRDLKSKNILVKKNGTCCIADLGLAVRHDSATDTIDIAPNHRVGTKRYMAPEVLDDSINMKHFESFKRADIYAMGLVFWEIARRCSIGGIHEDYQLPYYDLVPSDPSVEEMRKVVCEQKLRPNIPNRWQSCEALRVMAKIMRECWYANGAARLTALRIKKTLSQLSQQEGIKM

SEQ ID NO: 31 - protein, 102 aa, Homo sapiens
AALLPGATALQCFCHLCTKDNFTCVTDGLCFVSVTETTDKVIHNSMCIAEIDLIPRDRPFVCAPSSKTGSVTTTYCCNQDHCNKIELPTTVKSSPGLGPVEL

SEQ ID NO: 32 - DNA, 1509 bp, Homo sapiens
atggaggcggcggtcgctgctccgcgtccccggctgctcctcctcgtgctggcggcggcggcggcggcggcggcggcgctgctcccgggggcgacggcgttacagtgtttctgccacctctgtacaaaagacaattttacttgtgtgacagatgggctctgctttgtctctgtcacagagaccacagacaaagttatacacaacagcatgtgtatagctgaaattgacttaattcctcgagataggccgtttgtatgtgcaccctcttcaaaaactgggtctgtgactacaacatattgctgcaatcaggaccattgcaataaaatagaacttccaactactgtaaagtcatcacctggccttggtcctgtggaactggcagctgtcattgctggaccagtgtgcttcgtctgcatctcactcatgttgatggtctatatctgccacaaccgcactgtcattcaccatcgagtgccaaatgaagaggacccttcattagatcgcccttttatttcagagggtactacgttgaaagacttaatttatgatatgacaacgtcaggttctggctcaggtttaccattgcttgttcagagaacaattgcgagaactattgtgttacaagaaagcattggcaaaggtcgatttggagaagtttggagaggaaagtggcggggagaagaagttgctgttaagatattctcctctagagaagaacgttcgtggttccgtgaggcagagatttatcaaactgtaatgttacgtcatgaaaacatcctgggatttatagcagcagacaataaagacaatggtacttggactcagctctggttggtgtcagattatcatgagcatggatccctttttgattacttaaacagatacacagttactgtggaaggaatgataaaacttgctctgtccacggcgagcggtcttgcccatcttcacatggagattgttggtacccaaggaaagccagccattgctcatagagatttgaaatcaaagaatatcttggtaaagaagaatggaacttgctgtattgcagacttaggactggcagtaagacatgattcagccacagataccattgatattgctccaaaccacagagtgggaacaaaaaggtacatggcccctgaagttctcgatgattccataaatatgaaacattttgaatccttcaaacgtgctgacatctatgcaatgggcttagtattctgggaaattgctcgacgatgttccattggtggaattcatgaagattaccaactgccttattatgatcttgtaccttctgacccatcagttgaagaaatgagaaaagttgtttgtgaacagaagttaaggccaaatatcccaaacagatggcagagctgtgaagccttgagagtaatggctaaaattatgagagaatgttggtatgccaatggagcagctaggcttacagcattgcggattaagaaaacattatcgcaactcagtcaacaggaaggcatcaaaatg

SEQ ID NO: 33 - DNA, 306 bp, Homo sapiens
gcggcgctgctcccgggggcgacggcgttacagtgtttctgccacctctgtacaaaagacaattttacttgtgtgacagatgggctctgctttgtctctgtcacagagaccacagacaaagttatacacaacagcatgtgtatagctgaaattgacttaattcctcgagataggccgtttgtatgtgcaccctcttcaaaaactgggtctgtgactacaacatattgctgcaatcaggaccattgcaataaaatagaacttccaactactgtaaagtcatcacctggccttggtcctgtggaactg

SEQ ID NO: 34 - protein, 502 aa, Homo sapiens
MLLRSAGKLNVGTKKEDGESTAPTPRPKVLRCKCHHHCPEDSVNNICSTDGYCFTMIEEDDSGLPVVTSGCLGLEGSDFQCRDTPIPHQRRSIECCTERNECNKDLHPTLPPLKNRDFVDGPIHHRALLISVTVCSLLLVLIILFCYFRYKRQETRPRYSIGLEQDETYIPPGESLRDLIEQSQSSGSGSGLPLLVQRTIAKQIQMVKQIGKGRYGEVWMGKWRGEKVAVKVFFTTEEASWFRETEIYQTVLMRHENILGFIAADIKGTGSWTQLYLITDYHENGSLYDYLKSTTLDAKSMLKLAYSSVSGLCHLHTEIFSTQGKPAIAHRDLKSKNILVKKNGTCCIADLGLAVKFISDTNEVDIPPNTRVGTKRYMPPEVLDESLNRNHFQSYIMADMYSFGLILWEVARRCVSGGIVEEYQLPYHDLVPSDPSYEDMREIVCIKKLRPSFPNRWSSDECLRQMGKLMTECWAHNPASRLTALRVKKTLAKMSESQDIKL

SEQ ID NO: 35 - protein, 113 aa, Homo sapiens
KKEDGESTAPTPRPKVLRCKCHHHCPEDSVNNICSTDGYCFTMIEEDDSGLPVVTSGCLGLEGSDFQCRDTPIPHQRRSIECCTERNECNKDLHPTLPPLKNRDFVDGPIHHR

SEQ ID NO: 36 - DNA, 1506 bp, Homo sapiens
atgcttttgcgaagtgcaggaaaattaaatgtgggcaccaagaaagaggatggtgagagtacagcccccaccccccgtccaaaggtcttgcgttgtaaatgccaccaccattgtccagaagactcagtcaacaatatttgcagcacagacggatattgtttcacgatgatagaagaggatgactctgggttgcctgtggtcacttctggttgcctaggactagaaggctcagattttcagtgtcgggacactcccattcctcatcaaagaagatcaattgaatgctgcacagaaaggaacgaatgtaataaagacctacaccctacactgcctccattgaaaaacagagattttgttgatggacctatacaccacagggctttacttatatctgtgactgtctgtagtttgctcttggtccttatcatattattttgttacttccggtataaaagacaagaaaccagacctcgatacagcattgggttagaacaggatgaaacttacattcctcctggagaatccctgagagacttaattgagcagtctcagagctcaggaagtggatcaggcctccctctgctggtccaaaggactatagctaagcagattcagatggtgaaacagattggaaaaggtcgctatggggaagtttggatgggaaagtggcgtggcgaaaaggtagctgtgaaagtgttcttcaccacagaggaagccagctggttcagagagacagaaatatatcagacagtgttgatgaggcatgaaaacattttgggtttcattgctgcagatatcaaagggacagggtcctggacccagttgtacctaatcacagactatcatgaaaatggttccctttatgattatctgaagtccaccaccctagacgctaaatcaatgctgaagttagcctactcttctgtcagtggcttatgtcatttacacacagaaatctttagtactcaaggcaaaccagcaattgcccatcgagatctgaaaagtaaaaacattctggtgaagaaaaatggaacttgctgtattgctgacctgggcctggctgttaaatttattagtgatacaaatgaagttgacataccacctaacactcgagttggcaccaaacgctatatgcctccagaagtgttggacgagagcttgaacagaaatcacttccagtcttacatcatggctgacatgtatagttttggcctcatcctttgggaggttgctaggagatgtgtatcaggaggtatagtggaagaataccagcttccttatcatgacctagtgcccagtgacccctcttatgaggacatgagggagattgtgtgcatcaagaagttacgcccctcattcccaaaccggtggagcagtgatgagtgtctaaggcagatgggaaaactcatgacagaatgctgggctcacaatcctgcatcaaggctgacagccctgcgggttaagaaaacacttgccaaaatgtcagagtcccaggacattaaactc

SEQ ID NO: 37 - DNA, 339 bp, Homo sapiens
aagaaagaggatggtgagagtacagcccccaccccccgtccaaaggtcttgcgttgtaaatgccaccaccattgtccagaagactcagtcaacaatatttgcagcacagacggatattgtttcacgatgatagaagaggatgactctgggttgcctgtggtcacttctggttgcctaggactagaaggctcagattttcagtgtcgggacactcccattcctcatcaaagaagatcaattgaatgctgcacagaaaggaacgaatgtaataaagacctacaccctacactgcctccattgaaaaacagagattttgttgatggacctatacaccacagg

SEQ ID NO: 38 - protein, 493 aa, Homo sapiens
MTRALCSALRQALLLLAAAAELSPGLKCVCLLCDSSNFTCQTEGACWASVMLTNGKEQVIKSCVSLPELNAQVFCHSSNNVTKTECCFTDFCNNITLHLPTASPNAPKLGPMELAIIITVPVCLLSIAAMLTVWACQGRQCSYRKKKRPNVEEPLSECNLVNAGKTLKDLIYDVTASGSGSGLPLLVQRTIARTIVLQEIVGKGRFGEVWHGRWCGEDVAVKIFSSRDERSWFREAEIYQTVMLRHENILGFIAADNKDNGTWTQLWLVSEYHEQGSLYDYLNRNIVTVAGMIKLALSIASGLAHLHMEIVGTQGKPAIAHRDIKSKNILVKKCETCAIADLGLAVKHDSILNTIDIPQNPKVGTKRYMAPEMLDDTMNVNIFESFKRADIYSVGLVYWEIARRCSVGGIVEEYQLPYYDMVPSDPSIEEMRKVVCDQKFRPSIPNQWQSCEALRVMGRIMRECWYANGAARLTALRIKKTISQLCVKEDCKA

SEQ ID NO: 39 - protein, 93 aa, Homo sapiens
ELSPGLKCVCLLCDSSNFTCQTEGACWASVMLTNGKEQVIKSCVSLPELNAQVFCHSSNNVTKTECCFTDFCNNITLHLPTASPNAPKLGPME

SEQ ID NO: 40 - DNA, 1479 bp, Homo sapiens
atgacccgggcgctctgctcagcgctccgccaggctctcctgctgctcgcagcggccgccgagctctcgccaggactgaagtgtgtatgtcttttgtgtgattcttcaaactttacctgccaaacagaaggagcatgttgggcatcagtcatgctaaccaatggaaaagagcaggtgatcaaatcctgtgtctcccttccagaactgaatgctcaagtcttctgtcatagttccaacaatgttaccaaaaccgaatgctgcttcacagatttttgcaacaacataacactgcaccttccaacagcatcaccaaatgccccaaaacttggacccatggagctggccatcattattactgtgcctgtttgcctcctgtccatagctgcgatgctgacagtatgggcatgccagggtcgacagtgctcctacaggaagaaaaagagaccaaatgtggaggaaccactctctgagtgcaatctggtaaatgctggaaaaactctgaaagatctgatttatgatgtgaccgcctctggatctggctctggtctacctctgttggttcaaaggacaattgcaaggacgattgtgcttcaggaaatagtaggaaaaggtagatttggtgaggtgtggcatggaagatggtgtggggaagatgtggctgtgaaaatattctcctccagagatgaaagatcttggtttcgtgaggcagaaatttaccagacggtcatgctgcgacatgaaaacatccttggtttcattgctgctgacaacaaagataatggaacttggactcaactttggctggtatctgaatatcatgaacagggctccttatatgactatttgaatagaaatatagtgaccgtggctggaatgatcaagctggcgctctcaattgctagtggtctggcacaccttcatatggagattgttggtacacaaggtaaacctgctattgctcatcgagacataaaatcaaagaatatcttagtgaaaaagtgtgaaacttgtgccatagcggacttagggttggctgtgaagcatgattcaatactgaacactatcgacatacctcagaatcctaaagtgggaaccaagaggtatatggctcctgaaatgcttgatgatacaatgaatgtgaatatctttgagtccttcaaacgagctgacatctattctgttggtctggtttactgggaaatagcccggaggtgttcagtcggaggaattgttgaggagtaccaattgccttattatgacatggtgccttcagatccctcgatagaggaaatgagaaaggttgtttgtgaccagaagtttcgaccaagtatcccaaaccagtggcaaagttgtgaagcactccgagtcatggggagaataatgcgtgagtgttggtatgccaacggagcggcccgcctaactgctcttcgtattaagaagactatatctcaactttgtgtcaaagaagactgcaaagcc

SEQ ID NO: 41 - DNA, 279 bp, Homo sapiens
gagctctcgccaggactgaagtgtgtatgtcttttgtgtgattcttcaaactttacctgccaaacagaaggagcatgttgggcatcagtcatgctaaccaatggaaaagagcaggtgatcaaatcctgtgtctcccttccagaactgaatgctcaagtcttctgtcatagttccaacaatgttaccaaaaccgaatgctgcttcacagatttttgcaacaacataacactgcaccttccaacagcatcaccaaatgccccaaaacttggacccatggag

SEQ ID NO: 42 - protein, 567 aa, Homo sapiens
MGRGLLRGLWPLHIVLWTRIASTIPPHVQKSVNNDMIVTDNNGAVKFPQLCKFCDVRFSTCDNQKSCMSNCSITSICEKPQEVCVAVWRKNDENITLETVCHDPKLPYHDFILEDAASPKCIMKEKKKPGETFFMCSCSSDECNDNIIFSEEYNTSNPDLLLVIFQVTGISLLPPLGVAISVIIIFYCYRVNRQQKLSSTWETGKTRKLMEFSEHCAIILEDDRSDISSTCANNINHNTELLPIELDTLVGKGRFAEVYKAKLKQNTSEQFETVAVKIFPYEEYASWKTEKDIFSDINLKHENILQFLTAEERKTELGKQYWLITAFHAKGNLQEYLTRHVISWEDLRKLGSSLARGIAHLHSDHTPCGRPKMPIVHRDLKSSNILVKNDLTCCLCDFGLSLRLDPTLSVDDLANSGQVGTARYMAPEVLESRMNLENVESFKQTDVYSMALVLWEMTSRCNAVGEVKDYEPPFGSKVREHPCVESMKDNVLRDRGRPEIPSFWLNHQGIQMVCETLTECWDHDPEARLTAQCVAERFSELEHLDRLSGRSCSEEKIPEDGSLNTTK

SEQ ID NO: 43 - protein, 144 aa, Homo sapiens
TIPPHVQKSVNNDMIVTDNNGAVKFPQLCKFCDVRFSTCDNQKSCMSNCSITSICEKPQEVCVAVWRKNDENITLETVCHDPKLPYHDFILEDAASPKCIMKEKKKPGETFFMCSCSSDECNDNIIFSEEYNTSNPDLLLVIFQ

SEQ ID NO: 44 - DNA, 1701 bp, Homo sapiens
atgggtcgggggctgctcaggggcctgtggccgctgcacatcgtcctgtggacgcgtatcgccagcacgatcccaccgcacgttcagaagtcggttaataacgacatgatagtcactgacaacaacggtgcagtcaagtttccacaactgtgtaaattttgtgatgtgagattttccacctgtgacaaccagaaatcctgcatgagcaactgcagcatcacctccatctgtgagaagccacaggaagtctgtgtggctgtatggagaaagaatgacgagaacataacactagagacagtttgccatgaccccaagctcccctaccatgactttattctggaagatgctgcttctccaaagtgcattatgaaggaaaaaaaaaagcctggtgagactttcttcatgtgttcctgtagctctgatgagtgcaatgacaacatcatcttctcagaagaatataacaccagcaatcctgacttgttgctagtcatatttcaagtgacaggcatcagcctcctgccaccactgggagttgccatatctgtcatcatcatcttctactgctaccgcgttaaccggcagcagaagctgagttcaacctgggaaaccggcaagacgcggaagctcatggagttcagcgagcactgtgccatcatcctggaagatgaccgctctgacatcagctccacgtgtgccaacaacatcaaccacaacacagagctgctgcccattgagctggacaccctggtggggaaaggtcgctttgctgaggtctataaggccaagctgaagcagaacacttcagagcagtttgagacagtggcagtcaagatctttccctatgaggagtatgcctcttggaagacagagaaggacatcttctcagacatcaatctgaagcatgagaacatactccagttcctgacggctgaggagcggaagacggagttggggaaacaatactggctgatcaccgccttccacgccaagggcaacctacaggagtacctgacgcggcatgtcatcagctgggaggacctgcgcaagctgggcagctccctcgcccgggggattgctcacctccacagtgatcacactccatgtgggaggcccaagatgcccatcgtgcacagggacctcaagagctccaatatcctcgtgaagaacgacctaacctgctgcctgtgtgactttgggctttccctgcgtctggaccctactctgtctgtggatgacctggctaacagtgggcaggtgggaactgcaagatacatggctccagaagtcctagaatccaggatgaatttggagaatgttgagtccttcaagcagaccgatgtctactccatggctctggtgctctgggaaatgacatctcgctgtaatgcagtgggagaagtaaaagattatgagcctccatttggttccaaggtgcgggagcacccctgtgtcgaaagcatgaaggacaacgtgttgagagatcgagggcgaccagaaattcccagcttctggctcaaccaccagggcatccagatggtgtgtgagacgttgactgagtgctgggaccacgacccagaggcccgtctcacagcccagtgtgtggcagaacgcttcagtgagctggagcatctggacaggctctcggggaggagctgctcggaggagaagattcctgaagacggctccctaaacactaccaaa

SEQ ID NO: 45 - DNA, 432 bp, Homo sapiens
acgatcccaccgcacgttcagaagtcggttaataacgacatgatagtcactgacaacaacggtgcagtcaagtttccacaactgtgtaaattttgtgatgtgagattttccacctgtgacaaccagaaatcctgcatgagcaactgcagcatcacctccatctgtgagaagccacaggaagtctgtgtggctgtatggagaaagaatgacgagaacataacactagagacagtttgccatgaccccaagctcccctaccatgactttattctggaagatgctgcttctccaaagtgcattatgaaggaaaaaaaaaagcctggtgagactttcttcatgtgttcctgtagctctgatgagtgcaatgacaacatcatcttctcagaagaatataacaccagcaatcctgacttgttgctagtcatatttcaa

SEQ ID NO: 46 - protein, 1038 aa, Homo sapiens
MTSSLQRPWRVPWLPWTILLVSTAAASQNQERLCAFKDPYQQDLGIGESRISHENGTILCSKGSTCYGLWEKSKGDINLVKQGCWSHIGDPQECHYEECVVTTTPPSIQNGTYRFCCCSTDLCNVNFTENFPPPDTTPLSPPHSFNRDETIIIALASVSVLAVLIVALCFGYRMLTGDRKQGLHSMNMMEAAASEPSLDLDNLKLLELIGRGRYGAVYKGSLDERPVAVKVFSFANRQNFINEKNIYRVPLMEHDNIARFIVGDERVTADGRMEYLLVMEYYPNGSLCKYLSLHTSDWVSSCRLAHSVTRGLAYLHTELPRGDHYKPAISHRDLNSRNVLVKNDGTCVISDFGLSMRLTGNRLVRPGEEDNAAISEVGTIRYMAPEVLEGAVNLRDCESALKQVDMYALGLIYWEIFMRCTDLFPGESVPEYQMAFQTEVGNHPTFEDMQVLVSREKQRPKFPEAWKENSLAVRSLKETIEDCWDQDAEARLTAQCAEERMAELMMIWERNKSVSPTVNPMSTAMQNERNLSHNRRVPKIGPYPDYSSSSYIEDSIHHTDSIVKNISSEHSMSSTPLTIGEKNRNSINYERQQAQARIPSPETSVTSLSTNTTTTNTTGLTPSTGMTTISEMPYPDETNLHTTNVAQSIGPTPVCLQLTEEDLETNKLDPKEVDKNLKESSDENLMEHSLKQFSGPDPLSSTSSSLLYPLIKLAVEATGQQDFTQTANGQACLIPDVLPTQIYPLPKQQNLPKRPTSLPLNTKNSTKEPRLKFGSKHKSNLKQVETGVAKMNTINAAEPHVVTVTMNGVAGRNHSVNSHAATTQYANGTVLSGQTTNIVTHRAQEMLQNQFIGEDTRLNINSSPDEHEPLLRREQQAGHDEGVLDRLVDRRERPLEGGRTNSNNNNSNPCSEQDVLAQGVPSTAADPGPSKPRRAQRPNSLDLSATNVLDGSSIQIGESTQDGKSGSGEKIKKRVKTPYSLKRWRPSTWVISTESLDCEVNNNGSNRAVHSKSSTAVYLAEGGTATTMVSKDIGMNCL

SEQ ID NO: 47 - protein, 124 aa, Homo sapiens [sequence omitted]

SEQ ID NO: 48 - DNA, 3114 bp, Homo sapiens
atgacttcctcgctgcagcggccctggcgggtgccctggctaccatggaccatcctgctggtcagcactgcggctgcttcgcagaatcaagaacggctatgtgcgtttaaagatccgtatcagcaagaccttgggataggtgagagtagaatctctcatgaaaatgggacaatattatgctcgaaaggtagcacctgctatggcctttgggagaaatcaaaaggggacataaatcttgtaaaacaaggatgttggtctcacattggagatccccaagagtgtcactatgaagaatgtgtagtaactaccactcctccctcaattcagaatggaacataccgtttctgctgttgtagcacagatttatgtaatgtcaactttactgagaattttccacctcctgacacaacaccactcagtccacctcattcatttaaccgagatgagacaataatcattgctttggcatcagtctctgtattagctgttttgatagttgccttatgctttggatacagaatgttgacaggagaccgtaaacaaggtcttcacagtatgaacatgatggaggcagcagcatccgaaccctctcttgatctagataatctgaaactgttggagctgattggccgaggtcgatatggagcagtatataaaggctccttggatgagcgtccagttgctgtaaaagtgttttcctttgcaaaccgtcagaattttatcaacgaaaagaacatttacagagtgcctttgatggaacatgacaacattgcccgctttatagttggagatgagagagtcactgcagatggacgcatggaatatttgcttgtgatggagtactatcccaatggatctttatgcaagtatttaagtctccacacaagtgactgggtaagctcttgccgtcttgctcattctgttactagaggactggcttatcttcacacagaattaccacgaggagatcattataaacctgcaatttcccatcgagatttaaacagcagaaatgtcctagtgaaaaatgatggaacctgtgttattagtgactttggactgtccatgaggctgactggaaatagactggtgcgcccaggggaggaagataatgcagccataagcgaggttggcactatcagatatatggcaccagaagtgctagaaggagctgtgaacttgagggactgtgaatcagctttgaaacaagtagacatgtatgctcttggactaatctattgggagatatttatgagatgtacagacctcttcccaggggaatccgtaccagagtaccagatggcttttcagacagaggttggaaaccatcccacttttgaggatatgcaggttctcgtgtctagggaaaaacagagacccaagttcccagaagcctggaaagaaaatagcctggcagtgaggtcactcaaggagacaatcgaagactgttgggaccaggatgcagaggctcggcttactgcacagtgtgctgaggaaaggatggctgaacttatgatgatttgggaaagaaacaaatctgtgagcccaacagtcaatccaatgtctactgctatgcagaatgaacgcaacctgtcacataataggcgtgtgccaaaaattggtccttatccagattattcttcctcctcatacattgaagactctatccatcatactgacagcatcgtgaagaatatttcctctgagcattctatgtccagcacacctttgactataggggaaaaaaaccgaaattcaattaactatgaacgacagcaagcacaagctcgaatccccagccctgaaacaagtgtcaccagcctctccaccaacacaacaaccacaaacaccacaggactcacgccaagtactggcatgactactatatctgagatgccatacccagatgaaacaaatctgcataccacaaatgttgcacagtcaattgggccaacccctgtctgcttacagctgacagaagaagacttggaaaccaacaagctagacccaaaagaagttgataagaacctcaaggaaagctctgatgagaatctcatggagcactctcttaaacagttcagtggcccagacccactgagcagtactagttctagcttgctttacccactcataaaacttgcagtagaagcaactggacagcaggacttcacacagactgcaaatggccaagcatgtttgattcctgatgttctgcctactcagatctatcctctccccaagcagcagaaccttcccaagagacctactagtttgcctttgaacaccaaaaattcaacaaaagagccccggctaaaatttggcagcaagcacaaatcaaacttgaaacaagtcgaaactggagttgccaagatgaatacaatcaatgcagcagaacctcatgtggtgacagtcaccatgaatggtgtggcaggtagaaaccacagtgttaactcccatgctgccacaacccaatatgccaatgggacagtactatctggccaaacaaccaacatagtgacacatagggcccaagaaatgttgcagaatcagtttattggtgaggacacccggctgaatattaattccagtcctgatgagcatgagcctttactgagacgagagcaacaagctggccatgatgaaggtgttctggatcgtcttgtggacaggagggaacggccactagaaggtggccgaactaattccaataacaacaacagcaatccatgttcagaacaagatgttcttgcacagggtgttccaagcacagcagcagatcctgggccatcaaagcccagaagagcacagaggcctaattctctggatctttcagccacaaatgtcctggatggcagcagtatacagataggtgagtcaacacaagatggcaaatcaggatcaggtgaaaagatcaagaaacgtgtgaaaactccctattctcttaagcggtggcgcccctccacctgggtcatctccactgaatcgctggactgtgaagtcaacaataatggcagtaacagggcagttcattccaaatccagcactgctgtttaccttgcagaaggaggcactgctacaaccatggtgtctaaagatataggaatgaactgtctg

SEQ ID NO: 49 - DNA, 372 bp, Homo sapiens
tcgcagaatcaagaacggctatgtgcgtttaaagatccgtatcagcaagaccttgggataggtgagagtagaatctctcatgaaaatgggacaatattatgctcgaaaggtagcacctgctatggcctttgggagaaatcaaaaggggacataaatcttgtaaaacaaggatgttggtctcacattggagatccccaagagtgtcactatgaagaatgtgtagtaactaccactcctccctcaattcagaatggaacataccgtttctgctgttgtagcacagatttatgtaatgtcaactttactgagaattttccacctcctgacacaacaccactcagtccacctcattcatttaaccgagatgagaca

SEQ ID NO: 50 - protein, 573 aa, Homo sapiens
MLGSLGLWALLPTAVEAPPNRRTCVFFEAPGVRGSTKTLGELLDTGTELPRAIRCLYSRCCFGIWNLTQDRAQVEMQGCRDSDEPGCESLHCDPSPRAHPSPGSTLFTCSCGTDFCNANYSHLPPPGSPGTPGSQGPQAAPGESIWMALVLLGLFLLLLLLLGSIILALLQRKNYRVRGEPVPEPRPDSGRDWSVELQELPELCFSQVIREGGHAVVWAGQLQGKLVAIKAFPPRSVAQFQAERALYELPGLQHDHIVRFITASRGGPGRLLSGPLLVLELHPKGSLCHYLTQYTSDWGSSLRMALSLAQGLAFLHEERWQNGQYKPGIAHRDLSSQNVLIREDGSCAIGDLGLALVLPGLTQPPAWTPTQPQGPAAIMEAGTQRYMAPELLDKTLDLQDWGMALRRADIYSLALLLWEILSRCPDLRPDSSPPPFQLAYEAELGNTPTSDELWALAVQERRRPYIPSTWRCFATDPDGLRELLEDCWDADPEARLTAECVQQRLAALAHPQESHPFPESCPRGCPPLCPEDCTSIPAPTILPCRPQRSACHFSVQQGPCSRNPQPACTLSPV

SEQ ID NO: 51 - protein, 132 aa, Homo sapiens [sequence omitted]

SEQ ID NO: 52 - DNA, 1719 bp, Homo sapiens
atgctagggtctttggggctttgggcattacttcccacagctgtggaagcacccccaaacaggcgaacctgtgtgttctttgaggcccctggagtgcggggaagcacaaagacactgggagagctgctagatacaggcacagagctccccagagctatccgctgcctctacagccgctgctgctttgggatctggaacctgacccaagaccgggcacaggtggaaatgcaaggatgccgagacagtgatgagccaggctgtgagtccctccactgtgacccaagtccccgagcccaccccagccctggctccactctcttcacctgctcctgtggcactgacttctgcaatgccaattacagccatctgcctcctccagggagccctgggactcctggctcccagggtccccaggctgccccaggtgagtccatctggatggcactggtgctgctggggctgttcctcctcctcctgctgctgctgggcagcatcatcttggccctgctacagcgaaagaactacagagtgcgaggtgagccagtgccagagccaaggccagactcaggcagggactggagtgtggagctgcaggagctgcctgagctgtgtttctcccaggtaatccgggaaggaggtcatgcagtggtttgggccgggcagctgcaaggaaaactggttgccatcaaggccttcccaccgaggtctgtggctcagttccaagctgagagagcattgtacgaacttccaggcctacagcacgaccacattgtccgatttatcactgccagccgggggggtcctggccgcctgctctctgggcccctgctggtactggaactgcatcccaagggctccctgtgccactacttgacccagtacaccagtgactggggaagttccctgcggatggcactgtccctggcccagggcctggcatttctccatgaggagcgctggcagaatggccaatataaaccaggtattgcccaccgagatctgagcagccagaatgtgctcattcgggaagatggatcgtgtgccattggagacctgggccttgccttggtgctccctggcctcactcagccccctgcctggacccctactcaaccacaaggcccagctgccatcatggaagctggcacccagaggtacatggcaccagagctcttggacaagactctggacctacaggattggggcatggccctccgacgagctgatatttactctttggctctgctcctgtgggagatactgagccgctgcccagatttgaggcctgacagcagtccaccacccttccaactggcctatgaggcagaactgggcaatacccctacctctgatgagctatgggccttggcagtgcaggagaggaggcgtccctacatcccatccacctggcgctgctttgccacagaccctgatgggctgagggagctcctagaagactgttgggatgcagacccagaagcacggctgacagctgagtgtgtacagcagcgcctggctgccttggcccatcctcaagagagccacccctttccagagagctgtccacgtggctgcccacctctctgcccagaagactgtacttcaattcctgcccctaccatcctcccctgtaggcctcagcggagtgcctgccacttcagcgttcagcaaggcccttgttccaggaatcctcagcctgcctgtaccctttctcctgtg

SEQ ID NO: 53 - DNA, 396 bp, Homo sapiens
cccccaaacaggcgaacctgtgtgttctttgaggcccctggagtgcggggaagcacaaagacactgggagagctgctagatacaggcacagagctccccagagctatccgctgcctctacagccgctgctgctttgggatctggaacctgacccaagaccgggcacaggtggaaatgcaaggatgccgagacagtgatgagccaggctgtgagtccctccactgtgacccaagtccccgagcccaccccagccctggctccactctcttcacctgctcctgtggcactgacttctgcaatgccaattacagccatctgcctcctccagggagccctgggactcctggctcccagggtccccaggctgccccaggtgagtccatctggatggcactg

SEQ ID NO: 54-57 - skipped (4 entries)

SEQ ID NO: 58 - protein, 3 aa, Artificial Sequence
  Description of Artificial Sequence: Synthetic peptide
GGG

SEQ ID NO: 59 - protein, 4 aa, Artificial Sequence
  Description of Artificial Sequence: Synthetic peptide
GGGG

SEQ ID NO: 60 - protein, 5 aa, Artificial Sequence
  Description of Artificial Sequence: Synthetic peptide
TGGGG

SEQ ID NO: 61 - protein, 5 aa, Artificial Sequence
  Description of Artificial Sequence: Synthetic peptide
SGGGG

SEQ ID NO: 62 - protein, 4 aa, Artificial Sequence
  Description of Artificial Sequence: Synthetic peptide
TGGG

SEQ ID NO: 63 - protein, 4 aa, Artificial Sequence
  Description of Artificial Sequence: Synthetic peptide
SGGG

SEQ ID NO: 64-66 - skipped (3 entries)

SEQ ID NO: 67 - protein, 592 aa, Homo sapiens
MGRGLLRGLWPLHIVLWTRIASTIPPHVQKSDVEMEAQKDEIICPSCNRTAHPLRHINNDMIVTDNNGAVKFPQLCKFCDVRFSTCDNQKSCMSNCSITSICEKPQEVCVAVWRKNDENITLETVCHDPKLPYHDFILEDAASPKCIMKEKKKPGETFFMCSCSSDECNDNIIFSEEYNTSNPDLLLVIFQVTGISLLPPLGVAISVIIIFYCYRVNRQQKLSSTWETGKTRKLMEFSEHCAIILEDDRSDISSTCANNINHNTELLPIELDTLVGKGRFAEVYKAKLKQNTSEQFETVAVKIFPYEEYASWKTEKDIFSDINLKHENILQFLTAEERKTELGKQYWLITAFHAKGNLQEYLTRHVISWEDLRKLGSSLARGIAHLHSDHTPCGRPKMPIVHRDLKSSNILVKNDLTCCLCDFGLSLRLDPTLSVDDLANSGQVGTARYMAPEVLESRMNLENVESFKQTDVYSMALVLWEMTSRCNAVGEVKDYEPPFGSKVREHPCVESMKDNVLRDRGRPEIPSFWLNHQGIQMVCETLTECWDHDPEARLTAQCVAERFSELEHLDRLSGRSCSEEKIPEDGSLNTTK

SEQ ID NO: 68 - protein, 169 aa, Homo sapiens
TIPPHVQKSDVEMEAQKDEIICPSCNRTAHPLRHINNDMIVTDNNGAVKFPQLCKFCDVRFSTCDNQKSCMSNCSITSICEKPQEVCVAVWRKNDENITLETVCHDPKLPYHDFILEDAASPKCIMKEKKKPGETFFMCSCSSDECNDNIIFSEEYNTSNPDLLLVIFQ

SEQ ID NO: 69 - DNA, 1776 bp, Homo sapiens
atgggtcgggggctgctcaggggcctgtggccgctgcacatcgtcctgtggacgcgtatcgccagcacgatcccaccgcacgttcagaagtcggatgtggaaatggaggcccagaaagatgaaatcatctgccccagctgtaataggactgcccatccactgagacatattaataacgacatgatagtcactgacaacaacggtgcagtcaagtttccacaactgtgtaaattttgtgatgtgagattttccacctgtgacaaccagaaatcctgcatgagcaactgcagcatcacctccatctgtgagaagccacaggaagtctgtgtggctgtatggagaaagaatgacgagaacataacactagagacagtttgccatgaccccaagctcccctaccatgactttattctggaagatgctgcttctccaaagtgcattatgaaggaaaaaaaaaagcctggtgagactttcttcatgtgttcctgtagctctgatgagtgcaatgacaacatcatcttctcagaagaatataacaccagcaatcctgacttgttgctagtcatatttcaagtgacaggcatcagcctcctgccaccactgggagttgccatatctgtcatcatcatcttctactgctaccgcgttaaccggcagcagaagctgagttcaacctgggaaaccggcaagacgcggaagctcatggagttcagcgagcactgtgccatcatcctggaagatgaccgctctgacatcagctccacgtgtgccaacaacatcaaccacaacacagagctgctgcccattgagctggacaccctggtggggaaaggtcgctttgctgaggtctataaggccaagctgaagcagaacacttcagagcagtttgagacagtggcagtcaagatctttccctatgaggagtatgcctcttggaagacagagaaggacatcttctcagacatcaatctgaagcatgagaacatactccagttcctgacggctgaggagcggaagacggagttggggaaacaatactggctgatcaccgccttccacgccaagggcaacctacaggagtacctgacgcggcatgtcatcagctgggaggacctgcgcaagctgggcagctccctcgcccgggggattgctcacctccacagtgatcacactccatgtgggaggcccaagatgcccatcgtgcacagggacctcaagagctccaatatcctcgtgaagaacgacctaacctgctgcctgtgtgactttgggctttccctgcgtctggaccctactctgtctgtggatgacctggctaacagtgggcaggtgggaactgcaagatacatggctccagaagtcctagaatccaggatgaatttggagaatgttgagtccttcaagcagaccgatgtctactccatggctctggtgctctgggaaatgacatctcgctgtaatgcagtgggagaagtaaaagattatgagcctccatttggttccaaggtgcgggagcacccctgtgtcgaaagcatgaaggacaacgtgttgagagatcgagggcgaccagaaattcccagcttctggctcaaccaccagggcatccagatggtgtgtgagacgttgactgagtgctgggaccacgacccagaggcccgtctcacagcccagtgtgtggcagaacgcttcagtgagctggagcatctggacaggctctcggggaggagctgctcggaggagaagattcctgaagacggctccctaaacactaccaaa

SEQ ID NO: 70 - DNA, 507 bp, Homo sapiens
acgatcccaccgcacgttcagaagtcggatgtggaaatggaggcccagaaagatgaaatcatctgccccagctgtaataggactgcccatccactgagacatattaataacgacatgatagtcactgacaacaacggtgcagtcaagtttccacaactgtgtaaattttgtgatgtgagattttccacctgtgacaaccagaaatcctgcatgagcaactgcagcatcacctccatctgtgagaagccacaggaagtctgtgtggctgtatggagaaagaatgacgagaacataacactagagacagtttgccatgaccccaagctcccctaccatgactttattctggaagatgctgcttctccaaagtgcattatgaaggaaaaaaaaaagcctggtgagactttcttcatgtgttcctgtagctctgatgagtgcaatgacaacatcatcttctcagaagaatataacaccagcaatcctgacttgttgctagtcatatttcaa

SEQ ID NO: 71 - protein, 530 aa, Homo sapiens
MTSSLQRPWRVPWLPWTILLVSTAAASQNQERLCAFKDPYQQDLGIGESRISHENGTILCSKGSTCYGLWEKSKGDINLVKQGCWSHIGDPQECHYEECVVTTTPPSIQNGTYRFCCCSTDLCNVNFTENFPPPDTTPLSPPHSFNRDETIIIALASVSVLAVLIVALCFGYRMLTGDRKQGLHSMNMMEAAASEPSLDLDNLKLLELIGRGRYGAVYKGSLDERPVAVKVFSFANRQNFINEKNIYRVPLMEHDNIARFIVGDERVTADGRMEYLLVMEYYPNGSLCKYLSLHTSDWVSSCRLAHSVTRGLAYLHTELPRGDHYKPAISHRDLNSRNVLVKNDGTCVISDFGLSMRLTGNRLVRPGEEDNAAISEVGTIRYMAPEVLEGAVNLRDCESALKQVDMYALGLIYWEIFMRCTDLFPGESVPEYQMAFQTEVGNHPTFEDMQVLVSREKQRPKFPEAWKENSLAVRSLKETIEDCWDQDAEARLTAQCAEERMAELMMIWERNKSVSPTVNPMSTAMQNERR

SEQ ID NO: 72 - protein, 124 aa, Homo sapiens [sequence omitted]

SEQ ID NO: 73 - DNA, 1590 bp, Homo sapiens
atgacttcctcgctgcagcggccctggcgggtgccctggctaccatggaccatcctgctggtcagcactgcggctgcttcgcagaatcaagaacggctatgtgcgtttaaagatccgtatcagcaagaccttgggataggtgagagtagaatctctcatgaaaatgggacaatattatgctcgaaaggtagcacctgctatggcctttgggagaaatcaaaaggggacataaatcttgtaaaacaaggatgttggtctcacattggagatccccaagagtgtcactatgaagaatgtgtagtaactaccactcctccctcaattcagaatggaacataccgtttctgctgttgtagcacagatttatgtaatgtcaactttactgagaattttccacctcctgacacaacaccactcagtccacctcattcatttaaccgagatgagacaataatcattgctttggcatcagtctctgtattagctgttttgatagttgccttatgctttggatacagaatgttgacaggagaccgtaaacaaggtcttcacagtatgaacatgatggaggcagcagcatccgaaccctctcttgatctagataatctgaaactgttggagctgattggccgaggtcgatatggagcagtatataaaggctccttggatgagcgtccagttgctgtaaaagtgttttcctttgcaaaccgtcagaattttatcaacgaaaagaacatttacagagtgcctttgatggaacatgacaacattgcccgctttatagttggagatgagagagtcactgcagatggacgcatggaatatttgcttgtgatggagtactatcccaatggatctttatgcaagtatttaagtctccacacaagtgactgggtaagctcttgccgtcttgctcattctgttactagaggactggcttatcttcacacagaattaccacgaggagatcattataaacctgcaatttcccatcgagatttaaacagcagaaatgtcctagtgaaaaatgatggaacctgtgttattagtgactttggactgtccatgaggctgactggaaatagactggtgcgcccaggggaggaagataatgcagccataagcgaggttggcactatcagatatatggcaccagaagtgctagaaggagctgtgaacttgagggactgtgaatcagctttgaaacaagtagacatgtatgctcttggactaatctattgggagatatttatgagatgtacagacctcttcccaggggaatccgtaccagagtaccagatggcttttcagacagaggttggaaaccatcccacttttgaggatatgcaggttctcgtgtctagggaaaaacagagacccaagttcccagaagcctggaaagaaaatagcctggcagtgaggtcactcaaggagacaatcgaagactgttgggaccaggatgcagaggctcggcttactgcacagtgtgctgaggaaaggatggctgaacttatgatgatttgggaaagaaacaaatctgtgagcccaacagtcaatccaatgtctactgctatgcagaatgaacgtagg

SEQ ID NO: 74 - DNA, 372 bp, Homo sapiens; identical to SEQ ID NO: 49

SEQ ID NO: 75 - protein, 478 aa, Homo sapiens
MLGSLGLWALLPTAVEAPPNRRTCVFFEAPGVRGSTKTLGELLDTGTELPRAIRCLYSRCCFGIWNLTQDRAQVEMQGCRDSDEPGCESLHCDPSPRAHPSPGSTLFTCSCGTDFCNANYSHLPPPGSPGTPGSQGPQAAPGESIWMALVLLGLFLLLLLLLGSIILALLQRKNYRVRGEPVPEPRPDSGRDWSVELQELPELCFSQVIREGGHAVVWAGQLQGKLVAIKAFPPRSVAQFQAERALYELPGLQHDHIVRFITASRGGPGRLLSGPLLVLELHPKGSLCHYLTQYTSDWGSSLRMALSLAQGLAFLHEERWQNGQYKPGIAHRDLSSQNVLIREDGSCAIGDLGLALVLPGLTQPPAWTPTQPQGPAAIMEAGTQRYMAPELLDKTLDLQDWGMALRRADIYSLALLLWEILSRCPDLRPAVHHPSNWPMRQNWAIPLPLMSYGPWQCRRGGVPTSHPPGAALPQTLMG

SEQ ID NO: 76 - protein, 132 aa, Homo sapiens [sequence omitted]

SEQ ID NO: 77 - DNA, 1434 bp, Homo sapiens
atgctagggtctttggggctttgggcattacttcccacagctgtggaagcacccccaaacaggcgaacctgtgtgttctttgaggcccctggagtgcggggaagcacaaagacactgggagagctgctagatacaggcacagagctccccagagctatccgctgcctctacagccgctgctgctttgggatctggaacctgacccaagaccgggcacaggtggaaatgcaaggatgccgagacagtgatgagccaggctgtgagtccctccactgtgacccaagtccccgagcccaccccagccctggctccactctcttcacctgctcctgtggcactgacttctgcaatgccaattacagccatctgcctcctccagggagccctgggactcctggctcccagggtccccaggctgccccaggtgagtccatctggatggcactggtgctgctggggctgttcctcctcctcctgctgctgctgggcagcatcatcttggccctgctacagcgaaagaactacagagtgcgaggtgagccagtgccagagccaaggccagactcaggcagggactggagtgtggagctgcaggagctgcctgagctgtgtttctcccaggtaatccgggaaggaggtcatgcagtggtttgggccgggcagctgcaaggaaaactggttgccatcaaggccttcccaccgaggtctgtggctcagttccaagctgagagagcattgtacgaacttccaggcctacagcacgaccacattgtccgatttatcactgccagccgggggggtcctggccgcctgctctctgggcccctgctggtactggaactgcatcccaagggctccctgtgccactacttgacccagtacaccagtgactggggaagttccctgcggatggcactgtccctggcccagggcctggcatttctccatgaggagcgctggcagaatggccaatataaaccaggtattgcccaccgagatctgagcagccagaatgtgctcattcgggaagatggatcgtgtgccattggagacctgggccttgccttggtgctccctggcctcactcagccccctgcctggacccctactcaaccacaaggcccagctgccatcatggaagctggcacccagaggtacatggcaccagagctcttggacaagactctggacctacaggattggggcatggccctccgacgagctgatatttactctttggctctgctcctgtgggagatactgagccgctgcccagatttgaggcctgcagtccaccacccttccaactggcctatgaggcagaactgggcaatacccctacctctgatgagctatgggccttggcagtgcaggagaggaggcgtccctacatcccatccacctggcgctgctttgccacagaccctgatgggc

SEQ ID NO: 78 - DNA, 396 bp, Homo sapiens; identical to SEQ ID NO: 53

SEQ ID NO: 79 - protein, 478 aa, Homo sapiens
MLGSLGLWALLPTAVEAPPNRRTCVFFEAPGVRGSTKTLGELLDTGTELPRAIRCLYSRCCFGIWNLTQDRAQVEMQGCRDSDEPGCESLHCDPSPRAHPSPGSTLFTCSCGTDFCNANYSHLPPPGSPGTPGSQGPQAAPGESIWMALVLLGLFLLLLLLLGSIILALLQRKNYRVRGEPVPEPRPDSGRDWSVELQELPELCFSQVIREGGHAVVWAGQLQGKLVAIKAFPPRSVAQFQAERALYELPGLQHDHIVRFITASRGGPGRLLSGPLLVLELHPKGSLCHYLTQYTSDWGSSLRMALSLAQGLAFLHEERWQNGQYKPGIAHRDLSSQNVLIREDGSCAIGDLGLALVLPGLTQPPAWTPTQPQGPAAIMEDPDGLRELLEDCWDADPEARLTAECVQQRLAALAHPQESHPFPESCPRGCPPLCPEDCTSIPAPTILPCRPQRSACHFSVQQGPCSRNPQPACTLSPV

SEQ ID NO: 80 - protein, 132 aa, Homo sapiens [sequence omitted]

SEQ ID NO: 81 - DNA, 1434 bp, Homo sapiens
atgctagggtctttggggctttgggcattacttcccacagctgtggaagcacccccaaacaggcgaacctgtgtgttctttgaggcccctggagtgcggggaagcacaaagacactgggagagctgctagatacaggcacagagctccccagagctatccgctgcctctacagccgctgctgctttgggatctggaacctgacccaagaccgggcacaggtggaaatgcaaggatgccgagacagtgatgagccaggctgtgagtccctccactgtgacccaagtccccgagcccaccccagccctggctccactctcttcacctgctcctgtggcactgacttctgcaatgccaattacagccatctgcctcctccagggagccctgggactcctggctcccagggtccccaggctgccccaggtgagtccatctggatggcactggtgctgctggggctgttcctcctcctcctgctgctgctgggcagcatcatcttggccctgctacagcgaaagaactacagagtgcgaggtgagccagtgccagagccaaggccagactcaggcagggactggagtgtggagctgcaggagctgcctgagctgtgtttctcccaggtaatccgggaaggaggtcatgcagtggtttgggccgggcagctgcaaggaaaactggttgccatcaaggccttcccaccgaggtctgtggctcagttccaagctgagagagcattgtacgaacttccaggcctacagcacgaccacattgtccgatttatcactgccagccgggggggtcctggccgcctgctctctgggcccctgctggtactggaactgcatcccaagggctccctgtgccactacttgacccagtacaccagtgactggggaagttccctgcggatggcactgtccctggcccagggcctggcatttctccatgaggagcgctggcagaatggccaatataaaccaggtattgcccaccgagatctgagcagccagaatgtgctcattcgggaagatggatcgtgtgccattggagacctgggccttgccttggtgctccctggcctcactcagccccctgcctggacccctactcaaccacaaggcccagctgccatcatggaagaccctgatgggctgagggagctcctagaagactgttgggatgcagacccagaagcacggctgacagctgagtgtgtacagcagcgcctggctgccttggcccatcctcaagagagccacccctttccagagagctgtccacgtggctgcccacctctctgcccagaagactgtacttcaattcctgcccctaccatcctcccctgtaggcctcagcggagtgcctgccacttcagcgttcagcaaggcccttgttccaggaatcctcagcctgcctgtaccctttctcctgtg

SEQ ID NO: 82 - DNA, 396 bp, Homo sapiens; identical to SEQ ID NO: 53

SEQ ID NO: 83 - protein, 546 aa, Homo sapiens
MAESAGASSFFPLVVLLLAGSGGSGPRGVQALLCACTSCLQANYTCETDGACMVSIFNLDGMEHHVRTCIPKVELVPAGKPFYCLSSEDLRNTHCCYTDYCNRIDLRVPSGHLKEPEHPSMWGPVELVGIIAGPVFLLFLIIIIVFLVINYHQRVYHNRQRLDMEDPSCEMCLSKDKTLQDLVYDLSTSGSGSGLPLFVQRTVARTIVLQEIIGKGRFGEVWRGRWRGGDVAVKIFSSREERSWFREAEIYQTVMLRHENILGFIAADNKADCSFLTLPWEVVMVSAAPKLRSLRLQYKGGRGRARFLFPLNNGTWTQLWLVSDYHEHGSLFDYLNRYTVTIEGMIKLALSAASGLAHLHMEIVGTQGKPGIAHRDLKSKNILVKKNGMCAIADLGLAVRHDAVTDTIDIAPNQRVGTKRYMAPEVLDETINMKHFDSFKCADIYALGLVYWEIARRCNSGGVHEEYQLPYYDLVPSDPSIEEMRKVVCDQKLRPNIPNWWQSYEALRVMGKMMRECWYANGAARLTALRIKKTLSQLSVQEDVKI

SEQ ID NO: 84 - protein, 103 aa, Homo sapiens; identical to SEQ ID NO: 27

SEQ ID NO: 85 - DNA, 1638 bp, Homo sapiens
atggcggagtcggccggagcctcctccttcttcccccttgttgtcctcctgctcgccggcagcggcgggtccgggccccggggggtccaggctctgctgtgtgcgtgcaccagctgcctccaggccaactacacgtgtgagacagatggggcctgcatggtttccattttcaatctggatgggatggagcaccatgtgcgcacctgcatccccaaagtggagctggtccctgccgggaagcccttctactgcctgagctcggaggacctgcgcaacacccactgctgctacactgactactgcaacaggatcgacttgagggtgcccagtggtcacctcaaggagcctgagcacccgtccatgtggggcccggtggagctggtaggcatcatcgccggcccggtgttcctcctgttcctcatcatcatcattgttttccttgtcattaactatcatcagcgtgtctatcacaaccgccagagactggacatggaagatccctcatgtgagatgtgtctctccaaagacaagacgctccaggatcttgtctacgatctctccacctcagggtctggctcagggttacccctctttgtccagcgcacagtggcccgaaccatcgttttacaagagattattggcaagggtcggtttggggaagtatggcggggccgctggaggggtggtgatgtggctgtgaaaatattctcttctcgtgaagaacggtcttggttcagggaagcagagatataccagacggtcatgctgcgccatgaaaacatccttggatttattgctgctgacaataaagcagactgctcattcctcacattgccatgggaagttgtaatggtctctgctgcccccaagctgaggagccttagactccaatacaagggaggaaggggaagagcaagatttttattcccactgaataatggcacctggacacagctgtggcttgtttctgactatcatgagcacgggtccctgtttgattatctgaaccggtacacagtgacaattgaggggatgattaagctggccttgtctgctgctagtgggctggcacacctgcacatggagatcgtgggcacccaagggaagcctggaattgctcatcgagacttaaagtcaaagaacattctggtgaagaaaaatggcatgtgtgccatagcagacctgggcctggctgtccgtcatgatgcagtcactgacaccattgacattgccccgaatcagagggtggggaccaaacgatacatggcccctgaagtacttgatgaaaccattaatatgaaacactttgactcctttaaatgtgctgatatttatgccctcgggcttgtatattgggagattgctcgaagatgcaattctggaggagtccatgaagaatatcagctgccatattacgacttagtgccctctgacccttccattgaggaaatgcgaaaggttgtatgtgatcagaagctgcgtcccaacatccccaactggtggcagagttatgaggcactgcgggtgatggggaagatgatgcgagagtgttggtatgccaacggcgcagcccgcctgacggccctgcgcatcaagaagaccctctcccagctcagcgtgcaggaagacgtgaagatc

SEQ ID NO: 86 - DNA, 309 bp, Homo sapiens; identical to SEQ ID NO: 29

SEQ ID NO: 87 - protein, 507 aa, Homo sapiens
MEAAVAAPRPRLLLLVLAAAAAAAAALLPGATALQCFCHLCTKDNFTCVTDGLCFVSVTETTDKVIHNSMCIAEIDLIPRDRPFVCAPSSKTGSVTTTYCCNQDHCNKIELPTTGPFSVKSSPGLGPVELAAVIAGPVCFVCISLMLMVYICHNRTVIHHRVPNEEDPSLDRPFISEGTTLKDLIYDMTTSGSGSGLPLLVQRTIARTIVLQESIGKGRFGEVWRGKWRGEEVAVKIFSSREERSWFREAEIYQTVMLRHENILGFIAADNKDNGTWTQLWLVSDYHEHGSLFDYLNRYTVTVEGMIKLALSTASGLAHLHMEIVGTQGKPAIAHRDLKSKNILVKKNGTCCIADLGLAVRHDSATDTIDIAPNHRVGTKRYMAPEVLDDSINMKHFESFKRADIYAMGLVFWEIARRCSIGGIHEDYQLPYYDLVPSDPSVEEMRKVVCEQKLRPNIPNRWQSCEALRVMAKIMRECWYANGAARLTALRIKKTLSQLSQQEGIKM

SEQ ID NO: 88 - protein, 106 aa, Homo sapiens
AALLPGATALQCFCHLCTKDNFTCVTDGLCFVSVTETTDKVIHNSMCIAEIDLIPRDRPFVCAPSSKTGSVTTTYCCNQDHCNKIELPTTGPFSVKSSPGLGPVEL

SEQ ID NO: 89 - DNA, 1521 bp, Homo sapiens
atggaggcggcggtcgctgctccgcgtccccggctgctcctcctcgtgctggcggcggcggcggcggcggcggcggcgctgctcccgggggcgacggcgttacagtgtttctgccacctctgtacaaaagacaattttacttgtgtgacagatgggctctgctttgtctctgtcacagagaccacagacaaagttatacacaacagcatgtgtatagctgaaattgacttaattcctcgagataggccgtttgtatgtgcaccctcttcaaaaactgggtctgtgactacaacatattgctgcaatcaggaccattgcaataaaatagaacttccaactactggccctttttcagtaaagtcatcacctggccttggtcctgtggaactggcagctgtcattgctggaccagtgtgcttcgtctgcatctcactcatgttgatggtctatatctgccacaaccgcactgtcattcaccatcgagtgccaaatgaagaggacccttcattagatcgcccttttatttcagagggtactacgttgaaagacttaatttatgatatgacaacgtcaggttctggctcaggtttaccattgcttgttcagagaacaattgcgagaactattgtgttacaagaaagcattggcaaaggtcgatttggagaagtttggagaggaaagtggcggggagaagaagttgctgttaagatattctcctctagagaagaacgttcgtggttccgtgaggcagagatttatcaaactgtaatgttacgtcatgaaaacatcctgggatttatagcagcagacaataaagacaatggtacttggactcagctctggttggtgtcagattatcatgagcatggatccctttttgattacttaaacagatacacagttactgtggaaggaatgataaaacttgctctgtccacggcgagcggtcttgcccatcttcacatggagattgttggtacccaaggaaagccagccattgctcatagagatttgaaatcaaagaatatcttggtaaagaagaatggaacttgctgtattgcagacttaggactggcagtaagacatgattcagccacagataccattgatattgctccaaaccacagagtgggaacaaaaaggtacatggcccctgaagttctcgatgattccataaatatgaaacattttgaatccttcaaacgtgctgacatctatgcaatgggcttagtattctgggaaattgctcgacgatgttccattggtggaattcatgaagattaccaactgccttattatgatcttgtaccttctgacccatcagttgaagaaatgagaaaagttgtttgtgaacagaagttaaggccaaatatcccaaacagatggcagagctgtgaagccttgagagtaatggctaaaattatgagagaatgttggtatgccaatggagcagctaggcttacagcattgcggattaagaaaacattatcgcaactcagtcaacaggaaggcatcaaaatg

SEQ ID NO: 90 - DNA, 318 bp, Homo sapiens
gcggcgctgctcccgggggcgacggcgttacagtgtttctgccacctctgtacaaaagacaattttacttgtgtgacagatgggctctgctttgtctctgtcacagagaccacagacaaagttatacacaacagcatgtgtatagctgaaattgacttaattcctcgagataggccgtttgtatgtgcaccctcttcaaaaactgggtctgtgactacaacatattgctgcaatcaggaccattgcaataaaatagaacttccaactactggccctttttcagtaaagtcatcacctggccttggtcctgtggaactg

SEQ ID NO: 91 - protein, 532 aa, Homo sapiens
MGWLEELNWQLHIFLLILLSMHTRANFLDNMLLRSAGKLNVGTKKEDGESTAPTPRPKVLRCKCHHHCPEDSVNNICSTDGYCFTMIEEDDSGLPVVTSGCLGLEGSDFQCRDTPIPHQRRSIECCTERNECNKDLHPTLPPLKNRDFVDGPIHHRALLISVTVCSLLLVLIILFCYFRYKRQETRPRYSIGLEQDETYIPPGESLRDLIEQSQSSGSGSGLPLLVQRTIAKQIQMVKQIGKGRYGEVWMGKWRGEKVAVKVFFTTEEASWFRETEIYQTVLMRHENILGFIAADIKGTGSWTQLYLITDYHENGSLYDYLKSTTLDAKSMLKLAYSSVSGLCHLHTEIFSTQGKPAIAHRDLKSKNILVKKNGTCCIADLGLAVKFISDTNEVDIPPNTRVGTKRYMPPEVLDESLNRNHFQSYIMADMYSFGLILWEVARRCVSGGIVEEYQLPYHDLVPSDPSYEDMREIVCIKKLRPSFPNRWSSDECLRQMGKLMTECWAHNPASRLTALRVKKTLAKMSESQDIKL

SEQ ID NO: 92 - protein, 131 aa, Homo sapiens
NFLDNMLLRSAGKLNVGTKKEDGESTAPTPRPKVLRCKCHHHCPEDSVNNICSTDGYCFTMIEEDDSGLPVVTSGCLGLEGSDFQCRDTPIPHQRRSIECCTERNECNKDLHPTLPPLKNRDFVDGPIHHR

SEQ ID NO: 93 - DNA, 1596 bp, Homo sapiens
atgggttggctggaagaactaaactggcagcttcacattttcttgctcattcttctctctatgcacacaagggcaaacttccttgataacatgcttttgcgaagtgcaggaaaattaaatgtgggcaccaagaaagaggatggtgagagtacagcccccaccccccgtccaaaggtcttgcgttgtaaatgccaccaccattgtccagaagactcagtcaacaatatttgcagcacagacggatattgtttcacgatgatagaagaggatgactctgggttgcctgtggtcacttctggttgcctaggactagaaggctcagattttcagtgtcgggacactcccattcctcatcaaagaagatcaattgaatgctgcacagaaaggaacgaatgtaataaagacctacaccctacactgcctccattgaaaaacagagattttgttgatggacctatacaccacagggctttacttatatctgtgactgtctgtagtttgctcttggtccttatcatattattttgttacttccggtataaaagacaagaaaccagacctcgatacagcattgggttagaacaggatgaaacttacattcctcctggagaatccctgagagacttaattgagcagtctcagagctcaggaagtggatcaggcctccctctgctggtccaaaggactatagctaagcagattcagatggtgaaacagattggaaaaggtcgctatggggaagtttggatgggaaagtggcgtggcgaaaaggtagctgtgaaagtgttcttcaccacagaggaagccagctggttcagagagacagaaatatatcagacagtgttgatgaggcatgaaaacattttgggtttcattgctgcagatatcaaagggacagggtcctggacccagttgtacctaatcacagactatcatgaaaatggttccctttatgattatctgaagtccaccaccctagacgctaaatcaatgctgaagttagcctactcttctgtcagtggcttatgtcatttacacacagaaatctttagtactcaaggcaaaccagcaattgcccatcgagatctgaaaagtaaaaacattctggtgaagaaaaatggaacttgctgtattgctgacctgggcctggctgttaaatttattagtgatacaaatgaagttgacataccacctaacactcgagttggcaccaaacgctatatgcctccagaagtgttggacgagagcttgaacagaaatcacttccagtcttacatcatggctgacatgtatagttttggcctcatcctttgggaggttgctaggagatgtgtatcaggaggtatagtggaagaataccagcttccttatcatgacctagtgcccagtgacccctcttatgaggacatgagggagattgtgtgcatcaagaagttacgcccctcattcccaaaccggtggagcagtgatgagtgtctaaggcagatgggaaaactcatgacagaatgctgggctcacaatcctgcatcaaggctgacagccctgcgggttaagaaaacacttgccaaaatgtcagagtcccaggacattaaactc

SEQ ID NO: 94 - DNA, 393 bp, Homo sapiens
aacttccttgataacatgcttttgcgaagtgcaggaaaattaaatgtgggcaccaagaaagaggatggtgagagtacagcccccaccccccgtccaaaggtcttgcgttgtaaatgccaccaccattgtccagaagactcagtcaacaatatttgcagcacagacggatattgtttcacgatgatagaagaggatgactctgggttgcctgtggtcacttctggttgcctaggactagaaggctcagattttcagtgtcgggacactcccattcctcatcaaagaagatcaattgaatgctgcacagaaaggaacgaatgtaataaagacctacaccctacactgcctccattgaaaaacagagattttgttgatggacctatacaccacagg

SEQ ID NO: 95 - protein, 36 aa, Homo sapiens
GRCKIRHIGSNNRLQRSTCQNTGWESAHVMKTPGFR

SEQ ID NO: 96-99 - skipped (4 entries)

SEQ ID NO: 100 - protein, 22 aa, Artificial Sequence
  Description of Artificial Sequence: Synthetic peptide
MDAMKRGLCCVLLLCGAVFVSP

SEQ ID NO: 101 - protein, 574 aa, Artificial Sequence
  Description of Artificial Sequence: Synthetic polypeptide
MDAMKRGLCCVLLLCGAVFVSPGAETVHCDLQPVGPERDEVTYTTSQVSKGCVAQAPNAILEVHVLFLEFPTGPSQLELTLQASKQNGTWPREVLLVLSVNSSVFLHLQALGIPLHLAYNSSLVTFQEPPGVNTTELPSFPKTQILEWAAERGPITSAAELNDPQSILLRLGQAQGSLSFCMLEASQDMGRTLEWRPRTPALVRGCHLEGVAGHKEAHILRVLPGHSAGPRTVTVKVELSCAPGDLDAVLILQGPPYVSWLIDANHNMQIWTTGEYSFKIFPEKNIRGFKLPDTPQGLLGEARMLNASIVASFVELPLASIVSLHASSCGGRLQTSPAPIQTTPPTGGGTHTCPPCPAPELLGGPSVFLFPPKPKDTLMISRTPEVTCVVVDVSHEDPEVKFNWYVDGVEVHNAKTKPREEQYNSTYRVVSVLTVLHQDWLNGKEYKCKVSNKALPAPIEKTISKAKGQPREPQVYTLPPSRKEMTKNQVSLTCLVKGFYPSDIAVEWESNGQPENNYKTTPPVLKSDGSFFLYSKLTVDKSRWQQGNVFSCSVMHEALHNHYTQKSLSLSPGK

SEQ ID NO: 102 - DNA, 1722 bp, Artificial Sequence
  Description of Artificial Sequence: Synthetic polynucleotide
atggatgcaatgaagagagggctctgctgtgtgctgctgctgtgtggagcagtcttcgtttcgcccggcgccgaaacagtccattgtgaccttcagcctgtgggccccgagagggacgaggtgacatataccactagccaggtctcgaagggctgcgtggctcaggcccccaatgccatccttgaagtccatgtcctcttcctggagttcccaacgggcccgtcacagctggagctgactctccaggcatccaagcaaaatggcacctggccccgagaggtgcttctggtcctcagtgtaaacagcagtgtcttcctgcatctccaggccctgggaatcccactgcacttggcctacaattccagcctggtcaccttccaagagcccccgggggtcaacaccacagagctgccatccttccccaagacccagatccttgagtgggcagctgagaggggccccatcacctctgctgctgagctgaatgacccccagagcatcctcctccgactgggccaagcccaggggtcactgtccttctgcatgctggaagccagccaggacatgggccgcacgctcgagtggcggccgcgtactccagccttggtccggggctgccacttggaaggcgtggccggccacaaggaggcgcacatcctgagggtcctgccgggccactcggccgggccccggacggtgacggtgaaggtggaactgagctgcgcacccggggatctcgatgccgtcctcatcctgcagggtcccccctacgtgtcctggctcatcgacgccaaccacaacatgcagatctggaccactggagaatactccttcaagatctttccagagaaaaacattcgtggcttcaagctcccagacacacctcaaggcctcctgggggaggcccggatgctcaatgccagcattgtggcatccttcgtggagctaccgctggccagcattgtctcacttcatgcctccagctgcggtggtaggctgcagacctcacccgcaccgatccagaccactcctcccaccggtggtggaactcacacatgcccaccgtgcccagcacctgaactcctggggggaccgtcagtcttcctcttccccccaaaacccaaggacaccctcatgatctcccggacccctgaggtcacatgcgtggtggtggacgtgagccacgaagaccctgaggtcaagttcaactggtacgtggacggcgtggaggtgcataatgccaagacaaagccgcgggaggagcagtacaacagcacgtaccgtgtggtcagcgtcctcaccgtcctgcaccaggactggctgaatggcaaggagtacaagtgcaaggtctccaacaaagccctcccagcccccatcgagaaaaccatctccaaagccaaagggcagccccgagaaccacaggtgtacaccctgcccccatcccggaaggagatgaccaagaaccaggtcagcctgacctgcctggtcaaaggcttctatcccagcgacatcgccgtggagtgggagagcaatgggcagccggagaacaactacaagaccacgcctcccgtgctgaagtccgacggctccttcttcctctatagcaagctcaccgtggacaagagcaggtggcagcaggggaacgtcttctcatgctccgtgatgcatgaggctctgcacaaccactacacgcagaagagcctctccctgtccccgggtaaa

SEQ ID NO: 103 - protein, 550 aa, Artificial Sequence
  Description of Artificial Sequence: Synthetic polypeptide
ETVHCDLQPVGPERDEVTYTTSQVSKGCVAQAPNAILEVHVLFLEFPTGPSQLELTLQASKQNGTWPREVLLVLSVNSSVFLHLQALGIPLHLAYNSSLVTFQEPPGVNTTELPSFPKTQILEWAAERGPITSAAELNDPQSILLRLGQAQGSLSFCMLEASQDMGRTLEWRPRTPALVRGCHLEGVAGHKEAHILRVLPGHSAGPRTVTVKVELSCAPGDLDAVLILQGPPYVSWLIDANHNMQIWTTGEYSFKIFPEKNIRGFKLPDTPQGLLGEARMLNASIVASFVELPLASIVSLHASSCGGRLQTSPAPIQTTPPTGGGTHTCPPCPAPELLGGPSVFLFPPKPKDTLMISRTPEVTCVVVDVSHEDPEVKFNWYVDGVEVHNAKTKPREEQYNSTYRVVSVLTVLHQDWLNGKEYKCKVSNKALPAPIEKTISKAKGQPREPQVYTLPPSRKEMTKNQVSLTCLVKGFYPSDIAVEWESNGQPENNYKTTPPVLKSDGSFFLYSKLTVDKSRWQQGNVFSCSVMHEALHNHYTQKSLSLSPGK

SEQ ID NO: 104 - protein, 351 aa, Artificial Sequence
  Description of Artificial Sequence: Synthetic polypeptide
MDAMKRGLCCVLLLCGAVFVSPGADPVKPSRGPLVTCTCESPHCKGPTCRGAWCTVVLVREEGRHPQEHRGCGNLHRELCRGRPTEFVNHYCCDSHLCNHNVSLVLEATQPPSEQPGTDGQLATGGGTHTCPPCPAPELLGGPSVFLFPPKPKDTLMISRTPEVTCVVVDVSHEDPEVKFNWYVDGVEVHNAKTKPREEQYNSTYRVVSVLTVLHQDWLNGKEYKCKVSNKALPAPIEKTISKAKGQPREPQVYTLPPSREEMTKNQVSLTCLVKGFYPSDIAVEWESNGQPENNYDTTPPVLDSDGSFFLYSDLTVDKSRWQQGNVFSCSVMHEALHNHYTQKSLSLSPG

SEQ ID NO: 105 - DNA, 1053 bp, Artificial Sequence
  Description of Artificial Sequence: Synthetic polynucleotide
atggatgcaatgaagagagggctctgctgtgtgctgctgctgtgtggagcagtcttcgtttcgcccggcgccgaccctgtgaagccgtctcggggcccgctggtgacctgcacgtgtgagagcccacattgcaaggggcctacctgccggggggcctggtgcacagtagtgctggtgcgggaggaggggaggcacccccaggaacatcggggctgcgggaacttgcacagggagctctgcaggggccgccccaccgagttcgtcaaccactactgctgcgacagccacctctgcaaccacaacgtgtccctggtgctggaggccacccaacctccttcggagcagccgggaacagatggccagctggccaccggtggtggaactcacacatgcccaccgtgcccagcacctgaactcctggggggaccgtcagtcttcctcttccccccaaaacccaaggacaccctcatgatctcccggacccctgaggtcacatgcgtggtggtggacgtgagccacgaagaccctgaggtcaagttcaactggtacgtggacggcgtggaggtgcataatgccaagacaaagccgcgggaggagcagtacaacagcacgtaccgtgtggtcagcgtcctcaccgtcctgcaccaggactggctgaatggcaaggagtacaagtgcaaggtctccaacaaagccctcccagcccccatcgagaaaaccatctccaaagccaaagggcagccccgagaaccacaggtgtacaccctgcccccatcccgggaggagatgaccaagaaccaggtcagcctgacctgcctggtcaaaggcttctatcccagcgacatcgccgtggagtgggagagcaatgggcagccggagaacaactacgacaccacgcctcccgtgctggactccgacggctccttcttcctctatagcgacctcaccgtggacaagagcaggtggcagcaggggaacgtcttctcatgctccgtgatgcatgaggctctgcacaaccactacacgcagaagagcctctccctgtctccgggt

SEQ ID NO: 106 - protein, 327 aa, Artificial Sequence
  Description of Artificial Sequence: Synthetic polypeptide
DPVKPSRGPLVTCTCESPHCKGPTCRGAWCTVVLVREEGRHPQEHRGCGNLHRELCRGRPTEFVNHYCCDSHLCNHNVSLVLEATQPPSEQPGTDGQLATGGGTHTCPPCPAPELLGGPSVFLFPPKPKDTLMISRTPEVTCVVVDVSHEDPEVKFNWYVDGVEVHNAKTKPREEQYNSTYRVVSVLTVLHQDWLNGKEYKCKVSNKALPAPIEKTISKAKGQPREPQVYTLPPSREEMTKNQVSLTCLVKGFYPSDIAVEWESNGQPENNYDTTPPVLDSDGSFFLYSDLTVDKSRWQQGNVFSCSVMHEALHNHYTQKSLSLSPG

SEQ ID NO: 107 - protein, 355 aa, Artificial Sequence
  Description of Artificial Sequence: Synthetic polypeptide
MDAMKRGLCCVLLLCGAVFVSPGAMEDEKPKVNPKLYMCVCEGLSCGNEDHCEGQQCFSSLSINDGFHVYQKGCFQVYEQGKMTCKTPPSPGQAVECCQGDWCNRNITAQLPTKGKSFPGTQNFHLETGGGTHTCPPCPAPELLGGPSVFLFPPKPKDTLMISRTPEVTCVVVDVSHEDPEVKFNWYVDGVEVHNAKTKPREEQYNSTYRVVSVLTVLHQDWLNGKEYKCKVSNKALPAPIEKTISKAKGQPREPQVYTLPPSREEMTKNQVSLTCLVKGFYPSDIAVEWESNGQPENNYDTTPPVLDSDGSFFLYSDLTVDKSRWQQGNVFSCSVMHEALHNHYTQKSLSLSPG

SEQ ID NO: 108 - DNA, 1065 bp, Artificial Sequence
  Description of Artificial Sequence: Synthetic polynucleotide
atggatgcaatgaagagagggctctgctgtgtgctgctgctgtgtggagcagtcttcgtttcgcccggcgccatggaagatgagaagcccaaggtcaaccccaaactctacatgtgtgtgtgtgaaggtctctcctgcggtaatgaggaccactgtgaaggccagcagtgcttttcctcactgagcatcaacgatggcttccacgtctaccagaaaggctgcttccaggtttatgagcagggaaagatgacctgtaagaccccgccgtcccctggccaagctgtggagtgctgccaaggggactggtgtaacaggaacatcacggcccagctgcccactaaaggaaaatccttccctggaacacagaatttccacttggagaccggtggtggaactcacacatgcccaccgtgcccagcacctgaactcctggggggaccgtcagtcttcctcttccccccaaaacccaaggacaccctcatgatctcccggacccctgaggtcacatgcgtggtggtggacgtgagccacgaagaccctgaggtcaagttcaactggtacgtggacggcgtggaggtgcataatgccaagacaaagccgcgggaggagcagtacaacagcacgtaccgtgtggtcagcgtcctcaccgtcctgcaccaggactggctgaatggcaaggagtacaagtgcaaggtctccaacaaagccctcccagcccccatcgagaaaaccatctccaaagccaaagggcagccccgagaaccacaggtgtacaccctgcccccatcccgggaggagatgaccaagaaccaggtcagcctgacctgcctggtcaaaggcttctatcccagcgacatcgccgtggagtgggagagcaatgggcagccggagaacaactacgacaccacgcctcccgtgctggactccgacggctccttcttcctctatagcgacctcaccgtggacaagagcaggtggcagcaggggaacgtcttctcatgctccgtgatgcatgaggctctgcacaaccactacacgcagaagagcctctccctgtctccgggt

SEQ ID NO: 109 - protein, 331 aa, Artificial Sequence
  Description of Artificial Sequence: Synthetic polypeptide
MEDEKPKVNPKLYMCVCEGLSCGNEDHCEGQQCFSSLSINDGFHVYQKGCFQVYEQGKMTCKTPPSPGQAVECCQGDWCNRNITAQLPTKGKSFPGTQNFHLETGGGTHTCPPCPAPELLGGPSVFLFPPKPKDTLMISRTPEVTCVVVDVSHEDPEVKFNWYVDGVEVHNAKTKPREEQYNSTYRVVSVLTVLHQDWLNGKEYKCKVSNKALPAPIEKTISKAKGQPREPQVYTLPPSREEMTKNQVSLTCLVKGFYPSDIAVEWESNGQPENNYDTTPPVLDSDGSFFLYSDLTVDKSRWQQGNVFSCSVMHEALHNHYTQKSLSLSPG

SEQ ID NO: 110-199 - skipped (90 entries)

SEQ ID NO: 200 - protein, 225 aa, Artificial Sequence
  Description of Artificial Sequence: Synthetic polypeptide
THTCPPCPAPELLGGPSVFLFPPKPKDTLMISRTPEVTCVVVDVSHEDPEVKFNWYVDGVEVHNAKTKPREEQYNSTYRVVSVLTVLHQDWLNGKEYKCKVSNKALPAPIEKTISKAKGQPREPQVYTLPPSRKEMTKNQVSLTCLVKGFYPSDIAVEWESNGQPENNYKTTPPVLKSDGSFFLYSKLTVDKSRWQQGNVFSCSVMHEALHNHYTQKSLSLSPGK

SEQ ID NO: 201 - protein, 225 aa, Artificial Sequence
  Description of Artificial Sequence: Synthetic polypeptide
THTCPPCPAPELLGGPSVFLFPPKPKDTLMISRTPEVTCVVVDVSHEDPEVKFNWYVDGVEVHNAKTKPREEQYNSTYRVVSVLTVLHQDWLNGKEYKCKVSNKALPAPIEKTISKAKGQPREPQVYTLPPSREEMTKNQVSLTCLVKGFYPSDIAVEWESNGQPENNYDTTPPVLDSDGSFFLYSDLTVDKSRWQQGNVFSCSVMHEALHNHYTQKSLSLSPGK

SEQ ID NO: 202 - protein, 225 aa, Artificial Sequence
  Description of Artificial Sequence: Synthetic polypeptide
THTCPPCPAPELLGGPSVFLFPPKPKDTLMISRTPEVTCVVVDVSHEDPEVKFNWYVDGVEVHNAKTKPREEQYNSTYRVVSVLTVLHQDWLNGKEYKCKVSNKALPAPIEKTISKAKGQPREPQVYTLPPSREEMTKNQVSLYCLVKGFYPSDIAVEWESNGQPENNYKTTPPVLDSDGSFFLYSKLTVDKSRWQQGNVFSCSVMHEALHNHYTQKSLSLSPGK

SEQ ID NO: 203 - protein, 225 aa, Artificial Sequence
  Description of Artificial Sequence: Synthetic polypeptide
THTCPPCPAPELLGGPSVFLFPPKPKDTLMISRTPEVTCVVVDVSHEDPEVKFNWYVDGVEVHNAKTKPREEQYNSTYRVVSVLTVLHQDWLNGKEYKCKVSNKALPAPIEKTISKAKGQPREPQVYTLPPSREEMTKNQVSLTCLVKGFYPSDIAVEWESNGQPENNYKTTPPVLDSDGSFFLTSKLTVDKSRWQQGNVFSCSVMHEALHNHYTQKSLSLSPGK

SEQ ID NO: 204 - protein, 225 aa, Artificial Sequence
  Description of Artificial Sequence: Synthetic polypeptide
THTCPPCPAPELLGGPSVFLFPPKPKDTLMISRTPEVTCVVVDVSHEDPEVKFNWYVDGVEVHNAKTKPREEQYNSTYRVVSVLTVLHQDWLNGKEYKCKVSNKALPAPIEKTISKAKGQPREPQVYTLPPCREEMTKNQVSLWCLVKGFYPSDIAVEWESNGQPENNYKTTPPVLDSDGSFFLYSKLTVDKSRWQQGNVFSCSVMHEALHNHYTQKSLSLSPGK

SEQ ID NO: 205 - protein, 225 aa, Artificial Sequence
  Description of Artificial Sequence: Synthetic polypeptide
THTCPPCPAPELLGGPSVFLFPPKPKDTLMISRTPEVTCVVVDVSHEDPEVKFNWYVDGVEVHNAKTKPREEQYNSTYRVVSVLTVLHQDWLNGKEYKCKVSNKALPAPIEKTISKAKGQPREPQVCTLPPSREEMTKNQVSLSCAVKGFYPSDIAVEWESNGQPENNYKTTPPVLDSDGSFFLVSKLTVDKSRWQQGNVFSCSVMHEALHNHYTQKSLSLSPGK

SEQ ID NO: 206 - protein, 228 aa, Artificial Sequence
  Description of Artificial Sequence: Synthetic polypeptide
THTCPPCPAPELLGGPSVFLFPPKPKDTLMISRTPEVTCVVVDVSHEDPEVKFNWYVDGVEVHNAKTKPREEQYNSTYRVVSVLTVLHQDWLNGKEYKCKVSNKALPAPIEKTISKAKGQPFRPEVHLLPPSREEMTKNQVSLTCLARGFYPKDIAVEWESNGQPENNYKTTPSRQEPSQGTTTFAVTSKLTVDKSRWQQGNVFSCSVMHEALHNHYTQKTISLSPGK

SEQ ID NO: 207 - protein, 228 aa, Artificial Sequence
  Description of Artificial Sequence: Synthetic polypeptide
THTCPPCPAPELLGGPSVFLFPPKPKDTLMISRTPEVTCVVVDVSHEDPEVKFNWYVDGVEVHNAKTKPREEQYNSTYRVVSVLTVLHQDWLNGKEYKCKVSNKALPAPIEKTISKAKGQPREPQVYTLPPPSEELALNELVTLTCLVKGFYPSDIAVEWESNGQELPREKYLTWAPVLDSDGSFFLYSILRVAAEDWKKGDTFSCSVMHEALHNHYTQKSLDRSPGK

SEQ ID NO: 208 - protein, 225 aa, Homo sapiens
THTCPPCPAPELLGGPSVFLFPPKPKDTLMISRTPEVTCVVVDVSHEDPEVKFNWYVDGVEVHNAKTKPREEQYNSTYRVVSVLTVLHQDWLNGKEYKCKVSNKALPAPIEKTISKAKGQPREPQVYTLPPSREEMTKNQVSLTCLVKGFYPSDIAVEWESNGQPENNYKTTPPVLDSDGSFFLYSKLTVDKSRWQQGNVFSCSVMHEALHNHYTQKSLSLSPGK

SEQ ID NO: 209 - protein, 223 aa, Homo sapiens
VECPPCPAPPVAGPSVFLFPPKPKDTLMISRTPEVTCVVVDVSHEDPEVQFNWYVDGVEVHNAKTKPREEQFNSTFRVVSVLTVVHQDWLNGKEYKCKVSNKGLPAPIEKTISKTKGQPREPQVYTLPPSREEMTKNQVSLTCLVKGFYPSDIAVEWESNGQPENNYKTTPPMLDSDGSFFLYSKLTVDKSRWQQGNVFSCSVMHEALHNHYTQKSLSLSPGK

SEQ ID NO: 210 - protein, 232 aa, Homo sapiens
EPKSCDTPPPCPRCPAPELLGGPSVFLFPPKPKDTLMISRTPEVTCVVVDVSHEDPEVQFKWYVDGVEVHNAKTKPREEQYNSTFRVVSVLTVLHQDWLNGKEYKCKVSNKALPAPIEKTISKTKGQPREPQVYTLPPSREEMTKNQVSLTCLVKGFYPSDIAVEWESSGQPENNYNTTPPMLDSDGSFFLYSKLTVDKSRWQQGNIFSCSVMHEALHNRFTQKSLSLSPGK

SEQ ID NO: 211 - protein, 279 aa, Homo sapiens
ELKTPLGDTTHTCPRCPEPKSCDTPPPCPRCPEPKSCDTPPPCPRCPEPKSCDTPPPCPRCPAPELLGGPSVFLFPPKPKDTLMISRTPEVTCVVVDVSHEDPEVQFKWYVDGVEVHNAKTKPREEQYNSTFRVVSVLTVLHQDWLNGKEYKCKVSNKALPAPIEKTISKTKGQPREPQVYTLPPSREEMTKNQVSLTCLVKGFYPSDIAVEWESSGQPENNYNTTPPMLDSDGSFFLYSKLTVDKSRWQQGNIFSCSVMHEALHNRFTQKSLSLSPGK

SEQ ID NO: 212 - protein, 229 aa, Homo sapiens
ESKYGPPCPSCPAPEFLGGPSVFLFPPKPKDTLMISRTPEVTCVVVDVSQEDPEVQFNWYVDGVEVHNAKTKPREEQFNSTYRVVSVLTVLHQDWLNGKEYKCKVSNKGLPSSIEKTISKAKGQPREPQVYTLPPSQEEMTKNQVSLTCLVKGFYPSDIAVEWESNGQPENNYKTTPPVLDSDGSFFLYSRLTVDKSRWQEGNVFSCSVMHEALHNHYTQKSLSLSLGK

SEQ ID NO: 213 - protein, 261 aa, Artificial Sequence
  Description of Artificial Sequence: Synthetic polypeptide
THTCPPCPAPELLGGPSVFLFPPKPKDTLMISRTPEVTCVVVDVSHEDPEVKFNWYVDGVEVHNAKTKPREEQYNSTYRVVSVLTVLHQDWLNGKEYKCKVSNKALPAPIEKTISKAKGQPREPQVYTLPPSREEMTKNQVSLTCLVKGFYPSDIAVEWESNGQPENNYKTTPPVLDSDGSFFLYSKLTVDKSRWQQGNVFSCSVMHEALHNHYTQKSLSLSPGKGGSAQLEKELQALEKENAQLEWELQALEKELAQGAT

SEQ ID NO: 214 - protein, 261 aa, Artificial Sequence
  Description of Artificial Sequence: Synthetic polypeptide
THTCPPCPAPELLGGPSVFLFPPKPKDTLMISRTPEVTCVVVDVSHEDPEVKFNWYVDGVEVHNAKTKPREEQYNSTYRVVSVLTVLHQDWLNGKEYKCKVSNKALPAPIEKTISKAKGQPREPQVYTLPPSREEMTKNQVSLTCLVKGFYPSDIAVEWESNGQPENNYKTTPPVLDSDGSFFLYSKLTVDKSRWQQGNVFSCSVMHEALHNHYTQKSLSLSPGKGGSAQLKKKLQALKKKNAQLKWKLQALKKKLAQGAT

SEQ ID NO: 215 - protein, 225 aa, Artificial Sequence
  Description of Artificial Sequence: Synthetic polypeptide
THTCPPCPAPELLGGPSVFLFPPKPKDTLMISRTPEVTCVVVDVSHEDPEVKFNWYVDGVEVHNAKTKPREEQYNSTYRVVSVLTVLHQDWLNGKEYKCKVSNKALPAPIEKTISKAKGQPREPQVYTLPPCREEMTENQVSLWCLVKGFYPSDIAVEWESNGQPENNYKTTPPVLDSDGSFFLYSKLTVDKSRWQQGNVFSCSVMHEALHNHYTQDSLSLSPGK

SEQ ID NO: 216 - protein, 225 aa, Artificial Sequence
  Description of Artificial Sequence: Synthetic polypeptide
THTCPPCPAPELLGGPSVFLFPPKPKDTLMISRTPEVTCVVVDVSHEDPEVKFNWYVDGVEVHNAKTKPREEQYNSTYRVVSVLTVLHQDWLNGKEYKCKVSNKALPAPIEKTISKAKGQPREPQVCTLPPSREEMTKNQVSLSCAVKGFYPSDIAVEWESRGQPENNYKTTPPVLDSRGSFFLVSKLTVDKSRWQQGNVFSCSVMHEALHNHYTQKSLSLSPGK

SEQ ID NO: 217 - protein, 225 aa, Artificial Sequence
  Description of Artificial Sequence: Synthetic polypeptide
THTCPPCPAPELLGGPSVFLFPPKPKDTLMISRTPEVTCVVVDVSHEDPEVKFNWYVDGVEVHNAKTKPREEQYNSTYRVVSVLTVLHQDWLNGKEYKCKVSNKALPAPIEKTISKAKGQPREPQVYTLPPCREEMTKNQVSLWCLVKGFYPSDIAVEWESNGQPENNYKTTPPVLDSDGSFFLYSKLTVDKSRWQQGNVFSCSVMHEALHNRYTQKSLSLSPGK

SEQ ID NO: 218-300 - skipped (83 entries)

SEQ ID NO: 301 - protein, 443 aa, Homo sapiens
MLTNGKEQVIKSCVSLPELNAQVFCHSSNNVTKTECCFTDFCNNITLHLPTASPNAPKLGPMELAIIITVPVCLLSIAAMLTVWACQGRQCSYRKKKRPNVEEPLSECNLVNAGKTLKDLIYDVTASGSGSGLPLLVQRTIARTIVLQEIVGKGRFGEVWHGRWCGEDVAVKIFSSRDERSWFREAEIYQTVMLRHENILGFIAADNKDNGTWTQLWLVSEYHEQGSLYDYLNRNIVTVAGMIKLALSIASGLAHLHMEIVGTQGKPAIAHRDIKSKNILVKKCETCAIADLGLAVKHDSILNTIDIPQNPKVGTKRYMAPEMLDDTMNVNIFESFKRADIYSVGLVYWEIARRCSVGGIVEEYQLPYYDMVPSDPSIEEMRKVVCDQKFRPSIPNQWQSCEALRVMGRIMRECWYANGAARLTALRIKKTISQLCVKEDCKA

SEQ ID NO: 302 - protein, 63 aa, Homo sapiens
MLTNGKEQVIKSCVSLPELNAQVFCHSSNNVTKTECCFTDFCNNITLHLPTASPNAPKLGPME

SEQ ID NO: 303 - DNA, 1329 bp, Homo sapiens
atgctaaccaatggaaaagagcaggtgatcaaatcctgtgtctcccttccagaactgaatgctcaagtcttctgtcatagttccaacaatgttaccaaaaccgaatgctgcttcacagatttttgcaacaacataacactgcaccttccaacagcatcaccaaatgccccaaaacttggacccatggagctggccatcattattactgtgcctgtttgcctcctgtccatagctgcgatgctgacagtatgggcatgccagggtcgacagtgctcctacaggaagaaaaagagaccaaatgtggaggaaccactctctgagtgcaatctggtaaatgctggaaaaactctgaaagatctgatttatgatgtgaccgcctctggatctggctctggtctacctctgttggttcaaaggacaattgcaaggacgattgtgcttcaggaaatagtaggaaaaggtagatttggtgaggtgtggcatggaagatggtgtggggaagatgtggctgtgaaaatattctcctccagagatgaaagatcttggtttcgtgaggcagaaatttaccagacggtcatgctgcgacatgaaaacatccttggtttcattgctgctgacaacaaagataatggaacttggactcaactttggctggtatctgaatatcatgaacagggctccttatatgactatttgaatagaaatatagtgaccgtggctggaatgatcaagctggcgctctcaattgctagtggtctggcacaccttcatatggagattgttggtacacaaggtaaacctgctattgctcatcgagacataaaatcaaagaatatcttagtgaaaaagtgtgaaacttgtgccatagcggacttagggttggctgtgaagcatgattcaatactgaacactatcgacatacctcagaatcctaaagtgggaaccaagaggtatatggctcctgaaatgcttgatgatacaatgaatgtgaatatctttgagtccttcaaacgagctgacatctattctgttggtctggtttactgggaaatagcccggaggtgttcagtcggaggaattgttgaggagtaccaattgccttattatgacatggtgccttcagatccctcgatagaggaaatgagaaaggttgtttgtgaccagaagtttcgaccaagtatcccaaaccagtggcaaagttgtgaagcactccgagtcatggggagaataatgcgtgagtgttggtatgccaacggagcggcccgcctaactgctcttcgtattaagaagactatatctcaactttgtgtcaaagaagactgcaaagcc

SEQ ID NO: 304 - DNA, 189 bp, Homo sapiens
atgctaaccaatggaaaagagcaggtgatcaaatcctgtgtctcccttccagaactgaatgctcaagtcttctgtcatagttccaacaatgttaccaaaaccgaatgctgcttcacagatttttgcaacaacataacactgcaccttccaacagcatcaccaaatgccccaaaacttggacccatggag

SEQ ID NO: 305 - protein, 413 aa, Homo sapiens
MTRALCSALRQALLLLAAAAELSPGLKCVCLLCDSSNFTCQTEGACWASVMLTNGKEQVIKSCVSLPELNAQVFCHSSNNVTKTECCFTDFCNNITLHLPTGLPLLVQRTIARTIVLQEIVGKGRFGEVWHGRWCGEDVAVKIFSSRDERSWFREAEIYQTVMLRHENILGFIAADNKDNGTWTQLWLVSEYHEQGSLYDYLNRNIVTVAGMIKLALSIASGLAHLHMEIVGTQGKPAIAHRDIKSKNILVKKCETCAIADLGLAVKHDSILNTIDIPQNPKVGTKRYMAPEMLDDTMNVNIFESFKRADIYSVGLVYWEIARRCSVGGIVEEYQLPYYDMVPSDPSIEEMRKVVCDQKFRPSIPNQWQSCEALRVMGRIMRECWYANGAARLTALRIKKTISQLCVKEDCKA

SEQ ID NO: 306 - protein, 393 aa, Homo sapiens
ELSPGLKCVCLLCDSSNFTCQTEGACWASVMLTNGKEQVIKSCVSLPELNAQVFCHSSNNVTKTECCFTDFCNNITLHLPTGLPLLVQRTIARTIVLQEIVGKGRFGEVWHGRWCGEDVAVKIFSSRDERSWFREAEIYQTVMLRHENILGFIAADNKDNGTWTQLWLVSEYHEQGSLYDYLNRNIVTVAGMIKLALSIASGLAHLHMEIVGTQGKPAIAHRDIKSKNILVKKCETCAIADLGLAVKHDSILNTIDIPQNPKVGTKRYMAPEMLDDTMNVNIFESFKRADIYSVGLVYWEIARRCSVGGIVEEYQLPYYDMVPSDPSIEEMRKVVCDQKFRPSIPNQWQSCEALRVMGRIMRECWYANGAARLTALRIKKTISQLCVKEDCKA

SEQ ID NO: 307 - DNA, 1239 bp, Homo sapiens
atgacccgggcgctctgctcagcgctccgccaggctctcctgctgctcgcagcggccgccgagctctcgccaggactgaagtgtgtatgtcttttgtgtgattcttcaaactttacctgccaaacagaaggagcatgttgggcatcagtcatgctaaccaatggaaaagagcaggtgatcaaatcctgtgtctcccttccagaactgaatgctcaagtcttctgtcatagttccaacaatgttaccaaaaccgaatgctgcttcacagatttttgcaacaacataacactgcaccttccaacaggtctacctctgttggttcaaaggacaattgcaaggacgattgtgcttcaggaaatagtaggaaaaggtagatttggtgaggtgtggcatggaagatggtgtggggaagatgtggctgtgaaaatattctcctccagagatgaaagatcttggtttcgtgaggcagaaatttaccagacggtcatgctgcgacatgaaaacatccttggtttcattgctgctgacaacaaagataatggaacttggactcaactttggctggtatctgaatatcatgaacagggctccttatatgactatttgaatagaaatatagtgaccgtggctggaatgatcaagctggcgctctcaattgctagtggtctggcacaccttcatatggagattgttggtacacaaggtaaacctgctattgctcatcgagacataaaatcaaagaatatcttagtgaaaaagtgtgaaacttgtgccatagcggacttagggttggctgtgaagcatgattcaatactgaacactatcgacatacctcagaatcctaaagtgggaaccaagaggtatatggctcctgaaatgcttgatgatacaatgaatgtgaatatctttgagtccttcaaacgagctgacatctattctgttggtctggtttactgggaaatagcccggaggtgttcagtcggaggaattgttgaggagtaccaattgccttattatgacatggtgccttcagatccctcgatagaggaaatgagaaaggttgtttgtgaccagaagtttcgaccaagtatcccaaaccagtggcaaagttgtgaagcactccgagtcatggggagaataatgcgtgagtgttggtatgccaacggagcggcccgcctaactgctcttcgtattaagaagactatatctcaactttgtgtcaaagaagactgcaaagcc

SEQ ID NO: 308 - DNA, 1179 bp, Homo sapiens
gagctctcgccaggactgaagtgtgtatgtcttttgtgtgattcttcaaactttacctgccaaacagaaggagcatgttgggcatcagtcatgctaaccaatggaaaagagcaggtgatcaaatcctgtgtctcccttccagaactgaatgctcaagtcttctgtcatagttccaacaatgttaccaaaaccgaatgctgcttcacagatttttgcaacaacataacactgcaccttccaacaggtctacctctgttggttcaaaggacaattgcaaggacgattgtgcttcaggaaatagtaggaaaaggtagatttggtgaggtgtggcatggaagatggtgtggggaagatgtggctgtgaaaatattctcctccagagatgaaagatcttggtttcgtgaggcagaaatttaccagacggtcatgctgcgacatgaaaacatccttggtttcattgctgctgacaacaaagataatggaacttggactcaactttggctggtatctgaatatcatgaacagggctccttatatgactatttgaatagaaatatagtgaccgtggctggaatgatcaagctggcgctctcaattgctagtggtctggcacaccttcatatggagattgttggtacacaaggtaaacctgctattgctcatcgagacataaaatcaaagaatatcttagtgaaaaagtgtgaaacttgtgccatagcggacttagggttggctgtgaagcatgattcaatactgaacactatcgacatacctcagaatcctaaagtgggaaccaagaggtatatggctcctgaaatgcttgatgatacaatgaatgtgaatatctttgagtccttcaaacgagctgacatctattctgttggtctggtttactgggaaatagcccggaggtgttcagtcggaggaattgttgaggagtaccaattgccttattatgacatggtgccttcagatccctcgatagaggaaatgagaaaggttgtttgtgaccagaagtttcgaccaagtatcccaaaccagtggcaaagttgtgaagcactccgagtcatggggagaataatgcgtgagtgttggtatgccaacggagcggcccgcctaactgctcttcgtattaagaagactatatctcaactttgtgtcaaagaagactgcaaagcc

SEQ ID NO: 309 - protein, 336 aa, Homo sapiens
MTRALCSALRQALLLLAAAAELSPGLKCVCLLCDSSNFTCQTEGACWASVMLTNGKEQVIKSCVSLPELNAQVFCHSSNNVTKTECCFTDFCNNITLHLPTDNGTWTQLWLVSEYHEQGSLYDYLNRNIVTVAGMIKLALSIASGLAHLHMEIVGTQGKPAIAHRDIKSKNILVKKCETCAIADLGLAVKHDSILNTIDIPQNPKVGTKRYMAPEMLDDTMNVNIFESFKRADIYSVGLVYWEIARRCSVGGIVEEYQLPYYDMVPSDPSIEEMRKVVCDQKFRPSIPNQWQSCEALRVMGRIMRECWYANGAARLTALRIKKTISQLCVKEDCKA

SEQ ID NO: 310 - protein, 316 aa, Homo sapiens
ELSPGLKCVCLLCDSSNFTCQTEGACWASVMLTNGKEQVIKSCVSLPELNAQVFCHSSNNVTKTECCFTDFCNNITLHLPTDNGTWTQLWLVSEYHEQGSLYDYLNRNIVTVAGMIKLALSIASGLAHLHMEIVGTQGKPAIAHRDIKSKNILVKKCETCAIADLGLAVKHDSILNTIDIPQNPKVGTKRYMAPEMLDDTMNVNIFESFKRADIYSVGLVYWEIARRCSVGGIVEEYQLPYYDMVPSDPSIEEMRKVVCDQKFRPSIPNQWQSCEALRVMGRIMRECWYANGAARLTALRIKKTISQLCVKEDCKA

SEQ ID NO: 311 - DNA, 1011 bp, Homo sapiens
atgacccgggcgctctgctcagcgctccgccaggctctcctgctgctcgcagcggccgccgagctctcgccaggactgaagtgtgtatgtcttttgtgtgattcttcaaactttacctgccaaacagaaggagcatgttgggcatcagtcatgctaaccaatggaaaagagcaggtgatcaaatcctgtgtctcccttccagaactgaatgctcaagtcttctgtcatagttccaacaatgttaccaaaaccgaatgctgcttcacagatttttgcaacaacataacactgcaccttccaacagataatggaacttggactcaactttggctggtatctgaatatcatgaacagggctccttatatgactatttgaatagaaatatagtgaccgtggctggaatgatcaagctggcgctctcaattgctagtggtctggcacaccttcatatggagattgttggtacacaaggtaaacctgctattgctcatcgagacataaaatcaaagaatatcttagtgaaaaagtgtgaaacttgtgccatagcggacttagggttggctgtgaagcatgattcaatactgaacactatcgacatacctcagaatcctaaagtgggaaccaagaggtatatggctcctgaaatgcttgatgatacaatgaatgtgaatatctttgagtccttcaaacgagctgacatctattctgttggtctggtttactgggaaatagcccggaggtgttcagtcggaggaattgttgaggagtaccaattgccttattatgacatggtgccttcagatccctcgatagaggaaatgagaaaggttgtttgtgaccagaagtttcgaccaagtatcccaaaccagtggcaaagttgtgaagcactccgagtcatggggagaataatgcgtgagtgttggtatgccaacggagcggcccgcctaactgctcttcgtattaagaagactatatctcaactttgtgtcaaagaagactgcaaagcctaa

SEQ ID NO: 312 - DNA, 951 bp, Homo sapiens
gagctctcgccaggactgaagtgtgtatgtcttttgtgtgattcttcaaactttacctgccaaacagaaggagcatgttgggcatcagtcatgctaaccaatggaaaagagcaggtgatcaaatcctgtgtctcccttccagaactgaatgctcaagtcttctgtcatagttccaacaatgttaccaaaaccgaatgctgcttcacagatttttgcaacaacataacactgcaccttccaacagataatggaacttggactcaactttggctggtatctgaatatcatgaacagggctccttatatgactatttgaatagaaatatagtgaccgtggctggaatgatcaagctggcgctctcaattgctagtggtctggcacaccttcatatggagattgttggtacacaaggtaaacctgctattgctcatcgagacataaaatcaaagaatatcttagtgaaaaagtgtgaaacttgtgccatagcggacttagggttggctgtgaagcatgattcaatactgaacactatcgacatacctcagaatcctaaagtgggaaccaagaggtatatggctcctgaaatgcttgatgatacaatgaatgtgaatatctttgagtccttcaaacgagctgacatctattctgttggtctggtttactgggaaatagcccggaggtgttcagtcggaggaattgttgaggagtaccaattgccttattatgacatggtgccttcagatccctcgatagaggaaatgagaaaggttgtttgtgaccagaagtttcgaccaagtatcccaaaccagtggcaaagttgtgaagcactccgagtcatggggagaataatgcgtgagtgttggtatgccaacggagcggcccgcctaactgctcttcgtattaagaagactatatctcaactttgtgtcaaagaagactgcaaagcctaa

SEQ ID NO: 313 - protein, 88 aa, Homo sapiens
LKCVCLLCDSSNFTCQTEGACWASVMLTNGKEQVIKSCVSLPELNAQVFCHSSNNVTKTECCFTDFCNNITLHLPTASPNAPKLGPME

SEQ ID NO: 314-500 - skipped (187 entries)

SEQ ID NO: 501 - protein, 658 aa, Homo sapiens
MDRGTLPLAVALLLASCSLSPTSLAETVHCDLQPVGPERGEVTYTTSQVSKGCVAQAPNAILEVHVLFLEFPTGPSQLELTLQASKQNGTWPREVLLVLSVNSSVFLHLQALGIPLHLAYNSSLVTFQEPPGVNTTELPSFPKTQILEWAAERGPITSAAELNDPQSILLRLGQAQGSLSFCMLEASQDMGRTLEWRPRTPALVRGCHLEGVAGHKEAHILRVLPGHSAGPRTVTVKVELSCAPGDLDAVLILQGPPYVSWLIDANHNMQIWTTGEYSFKIFPEKNIRGFKLPDTPQGLLGEARMLNASIVASFVELPLASIVSLHASSCGGRLQTSPAPIQTTPPKDTCSPELLMSLIQTKCADDAMTLVLKKELVAHLKCTITGLTFWDPSCEAEDRGDKFVLRSAYSSCGMQVSASMISNEAVVNILSSSSPQRKKVHCLNMDSLSFQLGLYLSPHFLQASNTIEPGQQSFVQVRVSPSVSEFLLQLDSCHLDLGPEGGTVELIQGRAAKGNCVSLLSPSPEGDPRFSFLLHFYTVPIPKTGTLSCTVALRPKTGSQDQEVHRTVFMRLNIISPDLSGCTSKGLVLPAVLGITFGAFLIGALLTAALWYIYSHTRSPSKREPVVAVAAPASSESSSTNHSIGSTQSTPCSTSSMA

SEQ ID NO: 502 - protein, 561 aa, Homo sapiens
ETVHCDLQPVGPERGEVTYTTSQVSKGCVAQAPNAILEVHVLFLEFPTGPSQLELTLQASKQNGTWPREVLLVLSVNSSVFLHLQALGIPLHLAYNSSLVTFQEPPGVNTTELPSFPKTQILEWAAERGPITSAAELNDPQSILLRLGQAQGSLSFCMLEASQDMGRTLEWRPRTPALVRGCHLEGVAGHKEAHILRVLPGHSAGPRTVTVKVELSCAPGDLDAVLILQGPPYVSWLIDANHNMQIWTTGEYSFKIFPEKNIRGFKLPDTPQGLLGEARMLNASIVASFVELPLASIVSLHASSCGGRLQTSPAPIQTTPPKDTCSPELLMSLIQTKCADDAMTLVLKKELVAHLKCTITGLTFWDPSCEAEDRGDKFVLRSAYSSCGMQVSASMISNEAVVNILSSSSPQRKKVHCLNMDSLSFQLGLYLSPHFLQASNTIEPGQQSFVQVRVSPSVSEFLLQLDSCHLDLGPEGGTVELIQGRAAKGNCVSLLSPSPEGDPRFSFLLHFYTVPIPKTGTLSCTVALRPKTGSQDQEVHRTVFMRLNIISPDLSGCTSKG

SEQ ID NO: 503 - DNA, 1974 bp, Homo sapiens
atggaccgcggcacgctccctctggctgttgccctgctgctggccagctgcagcctcagccccacaagtcttgcagaaacagtccattgtgaccttcagcctgtgggccccgagaggggcgaggtgacatataccactagccaggtctcgaagggctgcgtggctcaggcccccaatgccatccttgaagtccatgtcctcttcctggagttcccaacgggcccgtcacagctggagctgactctccaggcatccaagcaaaatggcacctggccccgagaggtgcttctggtcctcagtgtaaacagcagtgtcttcctgcatctccaggccctgggaatcccactgcacttggcctacaattccagcctggtcaccttccaagagcccccgggggtcaacaccacagagctgccatccttccccaagacccagatccttgagtgggcagctgagaggggccccatcacctctgctgctgagctgaatgacccccagagcatcctcctccgactgggccaagcccaggggtcactgtccttctgcatgctggaagccagccaggacatgggccgcacgctcgagtggcggccgcgtactccagccttggtccggggctgccacttggaaggcgtggccggccacaaggaggcgcacatcctgagggtcctgccgggccactcggccgggccccggacggtgacggtgaaggtggaactgagctgcgcacccggggatctcgatgccgtcctcatcctgcagggtcccccctacgtgtcctggctcatcgacgccaaccacaacatgcagatctggaccactggagaatactccttcaagatctttccagagaaaaacattcgtggcttcaagctcccagacacacctcaaggcctcctgggggaggcccggatgctcaatgccagcattgtggcatccttcgtggagctaccgctggccagcattgtctcacttcatgcctccagctgcggtggtaggctgcagacctcacccgcaccgatccagaccactcctcccaaggacacttgtagcccggagctgctcatgtccttgatccagacaaagtgtgccgacgacgccatgaccctggtactaaagaaagagcttgttgcgcatttgaagtgcaccatcacgggcctgaccttctgggaccccagctgtgaggcagaggacaggggtgacaagtttgtcttgcgcagtgcttactccagctgtggcatgcaggtgtcagcaagtatgatcagcaatgaggcggtggtcaatatcctgtcgagctcatcaccacagcggaaaaaggtgcactgcctcaacatggacagcctctctttccagctgggcctctacctcagcccacacttcctccaggcctccaacaccatcgagccggggcagcagagctttgtgcaggtcagagtgtccccatccgtctccgagttcctgctccagttagacagctgccacctggacttggggcctgagggaggcaccgtggaactcatccagggccgggcggccaagggcaactgtgtgagcctgctgtccccaagccccgagggtgacccgcgcttcagcttcctcctccacttctacacagtacccatacccaaaaccggcaccctcagctgcacggtagccctgcgtcccaagaccgggtctcaagaccaggaagtccataggactgtcttcatgcgcttgaacatcatcagccctgacctgtctggttgcacaagcaaaggcctcgtcctgcccgccgtgctgggcatcacctttggtgccttcctcatcggggccctgctcactgctgcactctggtacatctactcgcacacgcgttcccccagcaagcgggagcccgtggtggcggtggctgccccggcctcctcggagagcagcagcaccaaccacagcatcgggagcacccagagcaccccctgctccaccagcagcatggca

SEQ ID NO: 504 - DNA, 1683 bp, Homo sapiens
gaaacagtccattgtgaccttcagcctgtgggccccgagaggggcgaggtgacatataccactagccaggtctcgaagggctgcgtggctcaggcccccaatgccatccttgaagtccatgtcctcttcctggagttcccaacgggcccgtcacagctggagctgactctccaggcatccaagcaaaatggcacctggccccgagaggtgcttctggtcctcagtgtaaacagcagtgtcttcctgcatctccaggccctgggaatcccactgcacttggcctacaattccagcctggtcaccttccaagagcccccgggggtcaacaccacagagctgccatccttccccaagacccagatccttgagtgggcagctgagaggggccccatcacctctgctgctgagctgaatgacccccagagcatcctcctccgactgggccaagcccaggggtcactgtccttctgcatgctggaagccagccaggacatgggccgcacgctcgagtggcggccgcgtactccagccttggtccggggctgccacttggaaggcgtggccggccacaaggaggcgcacatcctgagggtcctgccgggccactcggccgggccccggacggtgacggtgaaggtggaactgagctgcgcacccggggatctcgatgccgtcctcatcctgcagggtcccccctacgtgtcctggctcatcgacgccaaccacaacatgcagatctggaccactggagaatactccttcaagatctttccagagaaaaacattcgtggcttcaagctcccagacacacctcaaggcctcctgggggaggcccggatgctcaatgccagcattgtggcatccttcgtggagctaccgctggccagcattgtctcacttcatgcctccagctgcggtggtaggctgcagacctcacccgcaccgatccagaccactcctcccaaggacacttgtagcccggagctgctcatgtccttgatccagacaaagtgtgccgacgacgccatgaccctggtactaaagaaagagcttgttgcgcatttgaagtgcaccatcacgggcctgaccttctgggaccccagctgtgaggcagaggacaggggtgacaagtttgtcttgcgcagtgcttactccagctgtggcatgcaggtgtcagcaagtatgatcagcaatgaggcggtggtcaatatcctgtcgagctcatcaccacagcggaaaaaggtgcactgcctcaacatggacagcctctctttccagctgggcctctacctcagcccacacttcctccaggcctccaacaccatcgagccggggcagcagagctttgtgcaggtcagagtgtccccatccgtctccgagttcctgctccagttagacagctgccacctggacttggggcctgagggaggcaccgtggaactcatccagggccgggcggccaagggcaactgtgtgagcctgctgtccccaagccccgagggtgacccgcgcttcagcttcctcctccacttctacacagtacccatacccaaaaccggcaccctcagctgcacggtagccctgcgtcccaagaccgggtctcaagaccaggaagtccataggactgtcttcatgcgcttgaacatcatcagccctgacctgtctggttgcacaagcaaaggc

SEQ ID NO: 505 - protein, 625 aa, Homo sapiens
MDRGTLPLAVALLLASCSLSPTSLAETVHCDLQPVGPERGEVTYTTSQVSKGCVAQAPNAILEVHVLFLEFPTGPSQLELTLQASKQNGTWPREVLLVLSVNSSVFLHLQALGIPLHLAYNSSLVTFQEPPGVNTTELPSFPKTQILEWAAERGPITSAAELNDPQSILLRLGQAQGSLSFCMLEASQDMGRTLEWRPRTPALVRGCHLEGVAGHKEAHILRVLPGHSAGPRTVTVKVELSCAPGDLDAVLILQGPPYVSWLIDANHNMQIWTTGEYSFKIFPEKNIRGFKLPDTPQGLLGEARMLNASIVASFVELPLASIVSLHASSCGGRLQTSPAPIQTTPPKDTCSPELLMSLIQTKCADDAMTLVLKKELVAHLKCTITGLTFWDPSCEAEDRGDKFVLRSAYSSCGMQVSASMISNEAVVNILSSSSPQRKKVHCLNMDSLSFQLGLYLSPHFLQASNTIEPGQQSFVQVRVSPSVSEFLLQLDSCHLDLGPEGGTVELIQGRAAKGNCVSLLSPSPEGDPRFSFLLHFYTVPIPKTGTLSCTVALRPKTGSQDQEVHRTVFMRLNIISPDLSGCTSKGLVLPAVLGITFGAFLIGALLTAALWYIYSHTREYPRPPQ

SEQ ID NO: 506 - protein, 561 aa, Homo sapiens; identical to SEQ ID NO: 502

SEQ ID NO: 507 - DNA, 1875 bp, Homo sapiens
atggaccgcggcacgctccctctggctgttgccctgctgctggccagctgcagcctcagccccacaagtcttgcagaaacagtccattgtgaccttcagcctgtgggccccgagaggggcgaggtgacatataccactagccaggtctcgaagggctgcgtggctcaggcccccaatgccatccttgaagtccatgtcctcttcctggagttcccaacgggcccgtcacagctggagctgactctccaggcatccaagcaaaatggcacctggccccgagaggtgcttctggtcctcagtgtaaacagcagtgtcttcctgcatctccaggccctgggaatcccactgcacttggcctacaattccagcctggtcaccttccaagagcccccgggggtcaacaccacagagctgccatccttccccaagacccagatccttgagtgggcagctgagaggggccccatcacctctgctgctgagctgaatgacccccagagcatcctcctccgactgggccaagcccaggggtcactgtccttctgcatgctggaagccagccaggacatgggccgcacgctcgagtggcggccgcgtactccagccttggtccggggctgccacttggaaggcgtggccggccacaaggaggcgcacatcctgagggtcctgccgggccactcggccgggccccggacggtgacggtgaaggtggaactgagctgcgcacccggggatctcgatgccgtcctcatcctgcagggtcccccctacgtgtcctggctcatcgacgccaaccacaacatgcagatctggaccactggagaatactccttcaagatctttccagagaaaaacattcgtggcttcaagctcccagacacacctcaaggcctcctgggggaggcccggatgctcaatgccagcattgtggcatccttcgtggagctaccgctggccagcattgtctcacttcatgcctccagctgcggtggtaggctgcagacctcacccgcaccgatccagaccactcctcccaaggacacttgtagcccggagctgctcatgtccttgatccagacaaagtgtgccgacgacgccatgaccctggtactaaagaaagagcttgttgcgcatttgaagtgcaccatcacgggcctgaccttctgggaccccagctgtgaggcagaggacaggggtgacaagtttgtcttgcgcagtgcttactccagctgtggcatgcaggtgtcagcaagtatgatcagcaatgaggcggtggtcaatatcctgtcgagctcatcaccacagcggaaaaaggtgcactgcctcaacatggacagcctctctttccagctgggcctctacctcagcccacacttcctccaggcctccaacaccatcgagccggggcagcagagctttgtgcaggtcagagtgtccccatccgtctccgagttcctgctccagttagacagctgccacctggacttggggcctgagggaggcaccgtggaactcatccagggccgggcggccaagggcaactgtgtgagcctgctgtccccaagccccgagggtgacccgcgcttcagcttcctcctccacttctacacagtacccatacccaaaaccggcaccctcagctgcacggtagccctgcgtcccaagaccgggtctcaagaccaggaagtccataggactgtcttcatgcgcttgaacatcatcagccctgacctgtctggttgcacaagcaaaggcctcgtcctgcccgccgtgctgggcatcacctttggtgccttcctcatcggggccctgctcactgctgcactctggtacatctactcgcacacgcgtgagtaccccaggcccccacag

SEQ ID NO: 508 - DNA, 1683 bp, Homo sapiens; identical to SEQ ID NO: 504

SEQ ID NO: 509 - protein, 476 aa, Homo sapiens
MLEASQDMGRTLEWRPRTPALVRGCHLEGVAGHKEAHILRVLPGHSAGPRTVTVKVELSCAPGDLDAVLILQGPPYVSWLIDANHNMQIWTTGEYSFKIFPEKNIRGFKLPDTPQGLLGEARMLNASIVASFVELPLASIVSLHASSCGGRLQTSPAPIQTTPPKDTCSPELLMSLIQTKCADDAMTLVLKKELVAHLKCTITGLTFWDPSCEAEDRGDKFVLRSAYSSCGMQVSASMISNEAVVNILSSSSPQRKKVHCLNMDSLSFQLGLYLSPHFLQASNTIEPGQQSFVQVRVSPSVSEFLLQLDSCHLDLGPEGGTVELIQGRAAKGNCVSLLSPSPEGDPRFSFLLHFYTVPIPKTGTLSCTVALRPKTGSQDQEVHRTVFMRLNIISPDLSGCTSKGLVLPAVLGITFGAFLIGALLTAALWYIYSHTRSPSKREPVVAVAAPASSESSSTNHSIGSTQSTPCSTSSMA

SEQ ID NO: 510 - protein, 404 aa, Homo sapiens
MLEASQDMGRTLEWRPRTPALVRGCHLEGVAGHKEAHILRVLPGHSAGPRTVTVKVELSCAPGDLDAVLILQGPPYVSWLIDANHNMQIWTTGEYSFKIFPEKNIRGFKLPDTPQGLLGEARMLNASIVASFVELPLASIVSLHASSCGGRLQTSPAPIQTTPPKDTCSPELLMSLIQTKCADDAMTLVLKKELVAHLKCTITGLTFWDPSCEAEDRGDKFVLRSAYSSCGMQVSASMISNEAVVNILSSSSPQRKKVHCLNMDSLSFQLGLYLSPHFLQASNTIEPGQQSFVQVRVSPSVSEFLLQLDSCHLDLGPEGGTVELIQGRAAKGNCVSLLSPSPEGDPRFSFLLHFYTVPIPKTGTLSCTVALRPKTGSQDQEVHRTVFMRLNIISPDLSGCTSKG

SEQ ID NO: 511 - DNA, 1428 bp, Homo sapiens
atgctggaagccagccaggacatgggccgcacgctcgagtggcggccgcgtactccagccttggtccggggctgccacttggaaggcgtggccggccacaaggaggcgcacatcctgagggtcctgccgggccactcggccgggccccggacggtgacggtgaaggtggaactgagctgcgcacccggggatctcgatgccgtcctcatcctgcagggtcccccctacgtgtcctggctcatcgacgccaaccacaacatgcagatctggaccactggagaatactccttcaagatctttccagagaaaaacattcgtggcttcaagctcccagacacacctcaaggcctcctgggggaggcccggatgctcaatgccagcattgtggcatccttcgtggagctaccgctggccagcattgtctcacttcatgcctccagctgcggtggtaggctgcagacctcacccgcaccgatccagaccactcctcccaaggacacttgtagcccggagctgctcatgtccttgatccagacaaagtgtgccgacgacgccatgaccctggtactaaagaaagagcttgttgcgcatttgaagtgcaccatcacgggcctgaccttctgggaccccagctgtgaggcagaggacaggggtgacaagtttgtcttgcgcagtgcttactccagctgtggcatgcaggtgtcagcaagtatgatcagcaatgaggcggtggtcaatatcctgtcgagctcatcaccacagcggaaaaaggtgcactgcctcaacatggacagcctctctttccagctgggcctctacctcagcccacacttcctccaggcctccaacaccatcgagccggggcagcagagctttgtgcaggtcagagtgtccccatccgtctccgagttcctgctccagttagacagctgccacctggacttggggcctgagggaggcaccgtggaactcatccagggccgggcggccaagggcaactgtgtgagcctgctgtccccaagccccgagggtgacccgcgcttcagcttcctcctccacttctacacagtacccatacccaaaaccggcaccctcagctgcacggtagccctgcgtcccaagaccgggtctcaagaccaggaagtccataggactgtcttcatgcgcttgaacatcatcagccctgacctgtctggttgcacaagcaaaggcctcgtcctgcccgccgtgctgggcatcacctttggtgccttcctcatcggggccctgctcactgctgcactctggtacatctactcgcacacgcgttcccccagcaagcgggagcccgtggtggcggtggctgccccggcctcctcggagagcagcagcaccaaccacagcatcgggagcacccagagcaccccctgctccaccagcagcatggca

SEQ ID NO: 512 - DNA, 1200 bp, Homo sapiens
atgctggaagccagccaggacatgggccgcacgctcgagtggcggccgcgtactccagccttggtccggggctgccacttggaaggcgtggccggccacaaggaggcgcacatcctgagggtcctgccgggccactcggccgggccccggacggtgacggtgaaggtggaactgagctgcgcacccggggatctcgatgccgtcctcatcctgcagggtcccccctacgtgtcctggctcatcgacgccaaccacaacatgcagatctggaccactggagaatactccttcaagatctttccagagaaaaacattcgtggcttcaagctcccagacacacctcaaggcctcctgggggaggcccggatgctcaatgccagcattgtggcatccttcgtggagctaccgctggccagcattgtctcacttcatgcctccagctgcggtggtaggctgcagacctcacccgcaccgatccagaccactcctcccaaggacacttgtagcccggagctgctcatgtccttgatccagacaaagtgtgccgacgacgccatgaccctggtactaaagaaagagcttgttgcgcatttgaagtgcaccatcacgggcctgaccttctgggaccccagctgtgaggcagaggacaggggtgacaagtttgtcttgcgcagtgcttactccagctgtggcatgcaggtgtcagcaagtatgatcagcaatgaggcggtggtcaatatcctgtcgagctcatcaccacagcggaaaaaggtgcactgcctcaacatggacagcctctctttccagctgggcctctacctcagcccacacttcctccaggcctccaacaccatcgagccggggcagcagagctttgtgcaggtcagagtgtccccatccgtctccgagttcctgctccagttagacagctgccacctggacttggggcctgagggaggcaccgtggaactcatccagggccgggcggccaagggcaactgtgtgagcctgctgtccccaagccccgagggtgacccgcgcttcagcttcctcctccacttctacacagtacccatacccaaaaccggcaccctcagctgcacggtagccctgcgtcccaagaccgggtctcaagaccaggaagtccataggactgtcttcatgcgcttgaacatcatcagccctgacctgtctggttgc

SEQ ID NO: 513 - protein, 188 aa, Homo sapiens
MDCRKMARFSYSVIWIMAISKVFELGLVAGLGHQEFARPSRGYLAFRDDSIWPQEEPAIRPRSSQRVPPMGIQHSKELNRTCCLNGGTCMLGSFCACPPSFYGRNCEHDVRKENCGSVPHDTWLPKKCSLCKCWHGQLRCFPQAFLPGCDGLVMDEHLVASRTPELPPSARTTTFMLVGICLSIQSYY

SEQ ID NO: 514 - protein, 131 aa, Homo sapiens
LGHQEFARPSRGYLAFRDDSIWPQEEPAIRPRSSQRVPPMGIQHSKELNRTCCLNGGTCMLGSFCACPPSFYGRNCEHDVRKENCGSVPHDTWLPKKCSLCKCWHGQLRCFPQAFLPGCDGLVMDEHLVAS

SEQ ID NO: 515 - DNA, 564 bp, Homo sapiens
atggactgcaggaagatggcccgcttctcttacagtgtgatttggatcatggccatttctaaagtctttgaactgggattagttgccgggctgggccatcaggaatttgctcgtccatctcggggatacctggccttcagagatgacagcatttggccccaggaggagcctgcaattcggcctcggtcttcccagcgtgtgccgcccatggggatacagcacagtaaggagctaaacagaacctgctgcctgaatgggggaacctgcatgctggggtccttttgtgcctgccctccctccttctacggacggaactgtgagcacgatgtgcgcaaagagaactgtgggtctgtgccccatgacacctggctgcccaagaagtgttccctgtgtaaatgctggcacggtcagctccgctgctttcctcaggcatttctacccggctgtgatggccttgtgatggatgagcacctcgtggcttccaggactccagaactaccaccgtctgcacgtactaccacttttatgctagttggcatctgcctttctatacaaagctactat

SEQ ID NO: 516 - DNA, 393 bp, Homo sapiens
ctgggccatcaggaatttgctcgtccatctcggggatacctggccttcagagatgacagcatttggccccaggaggagcctgcaattcggcctcggtcttcccagcgtgtgccgcccatggggatacagcacagtaaggagctaaacagaacctgctgcctgaatgggggaacctgcatgctggggtccttttgtgcctgccctccctccttctacggacggaactgtgagcacgatgtgcgcaaagagaactgtgggtctgtgccccatgacacctggctgcccaagaagtgttccctgtgtaaatgctggcacggtcagctccgctgctttcctcaggcatttctacccggctgtgatggccttgtgatggatgagcacctcgtggcttcc

SEQ ID NO: 517 - protein, 172 aa, Homo sapiens
MAISKVFELGLVAGLGHQEFARPSRGYLAFRDDSIWPQEEPAIRPRSSQRVPPMGIQHSKELNRTCCLNGGTCMLGSFCACPPSFYGRNCEHDVRKENCGSVPHDTWLPKKCSLCKCWHGQLRCFPQAFLPGCDGLVMDEHLVASRTPELPPSARTTTFMLVGICLSIQSYY

SEQ ID NO: 518 - protein, 145 aa, Homo sapiens
MAISKVFELGLVAGLGHQEFARPSRGYLAFRDDSIWPQEEPAIRPRSSQRVPPMGIQHSKELNRTCCLNGGTCMLGSFCACPPSFYGRNCEHDVRKENCGSVPHDTWLPKKCSLCKCWHGQLRCFPQAFLPGCDGLVMDEHLVAS

SEQ ID NO: 519 - DNA, 516 bp, Homo sapiens
atggccatttctaaagtctttgaactgggattagttgccgggctgggccatcaggaatttgctcgtccatctcggggatacctggccttcagagatgacagcatttggccccaggaggagcctgcaattcggcctcggtcttcccagcgtgtgccgcccatggggatacagcacagtaaggagctaaacagaacctgctgcctgaatgggggaacctgcatgctggggtccttttgtgcctgccctccctccttctacggacggaactgtgagcacgatgtgcgcaaagagaactgtgggtctgtgccccatgacacctggctgcccaagaagtgttccctgtgtaaatgctggcacggtcagctccgctgctttcctcaggcatttctacccggctgtgatggccttgtgatggatgagcacctcgtggcttccaggactccagaactaccaccgtctgcacgtactaccacttttatgctagttggcatctgcctttctatacaaagctactat

SEQ ID NO: 520 - DNA, 435 bp, Homo sapiens
atggccatttctaaagtctttgaactgggattagttgccgggctgggccatcaggaatttgctcgtccatctcggggatacctggccttcagagatgacagcatttggccccaggaggagcctgcaattcggcctcggtcttcccagcgtgtgccgcccatggggatacagcacagtaaggagctaaacagaacctgctgcctgaatgggggaacctgcatgctggggtccttttgtgcctgccctccctccttctacggacggaactgtgagcacgatgtgcgcaaagagaactgtgggtctgtgccccatgacacctggctgcccaagaagtgttccctgtgtaaatgctggcacggtcagctccgctgctttcctcaggcatttctacccggctgtgatggccttgtgatggatgagcacctcgtggcttcc

SEQ ID NO: 521 - protein, 223 aa, Homo sapiens
MTWRHHVRLLFTVSLALQIINLGNSYQREKHNGGREEVTKVATQKHRQSPLNWTSSHFGEVTGSAEGWGPEEPLPYSRAFGEGASARPRCCRNGGTCVLGSFCVCPAHFTGRYCEHDQRRSECGALEHGAWTLRACHLCRCIFGALHCLPLQTPDRCDPKDFLASHAHGPSAGGAPSLLLLLPCALLHRLLRPDAPAHPRSLVPSVLQRERRPCGRPGLGHRL

SEQ ID NO: 522 - protein, 144 aa, Homo sapiens
YQREKHNGGREEVTKVATQKHRQSPLNWTSSHFGEVTGSAEGWGPEEPLPYSRAFGEGASARPRCCRNGGTCVLGSFCVCPAHFTGRYCEHDQRRSECGALEHGAWTLRACHLCRCIFGALHCLPLQTPDRCDPKDFLASHAHG

SEQ ID NO: 523 - DNA, 669 bp, Homo sapiens
atgacctggaggcaccatgtcaggcttctgtttacggtcagtttggcattacagatcatcaatttgggaaacagctatcaaagagagaaacataacggcggtagagaggaagtcaccaaggttgccactcagaagcaccgacagtcaccgctcaactggacctccagtcatttcggagaggtgactgggagcgccgagggctgggggccggaggagccgctcccctactcccgggctttcggagagggtgcgtccgcgcggccgcgctgctgcaggaacggcggtacctgcgtgctgggcagcttctgcgtgtgcccggcccacttcaccggccgctactgcgagcatgaccagaggcgcagtgaatgcggcgccctggagcacggagcctggaccctccgcgcctgccacctctgcaggtgcatcttcggggccctgcactgcctccccctccagacgcctgaccgctgtgacccgaaagacttcctggcctcccacgctcacgggccgagcgccgggggcgcgcccagcctgctactcttgctgccctgcgcactcctgcaccgcctcctgcgcccggatgcgcccgcgcaccctcggtccctggtcccttccgtcctccagcgggagcggcgcccctgcggaaggccgggacttgggcatcgcctt

SEQ ID NO: 524 - DNA, 432 bp, Homo sapiens
tatcaaagagagaaacataacggcggtagagaggaagtcaccaaggttgccactcagaagcaccgacagtcaccgctcaactggacctccagtcatttcggagaggtgactgggagcgccgagggctgggggccggaggagccgctcccctactcccgggctttcggagagggtgcgtccgcgcggccgcgctgctgcaggaacggcggtacctgcgtgctgggcagcttctgcgtgtgcccggcccacttcaccggccgctactgcgagcatgaccagaggcgcagtgaatgcggcgccctggagcacggagcctggaccctccgcgcctgccacctctgcaggtgcatcttcggggccctgcactgcctccccctccagacgcctgaccgctgtgacccgaaagacttcctggcctcccacgctcacggg

SEQ ID NO: 525 - protein, 191 aa, Homo sapiens
MTWRHHVRLLFTVSLALQIINLGNSYQREKHNGGREEVTKVATQKHRQSPLNWTSSHFGEVTGSAEGWGPEEPLPYSRAFGEVNAAPWSTEPGPSAPATSAGASSGPCTASPSRRLTAVTRKTSWPPTLTGRAPGARPACYSCCPAHSCTASCARMRPRTLGPWSLPSSSGSGAPAEGRDLGIAFNFLCCK

SEQ ID NO: 526 - protein, 166 aa, Homo sapiens
YQREKHNGGREEVTKVATQKHRQSPLNWTSSHFGEVTGSAEGWGPEEPLPYSRAFGEVNAAPWSTEPGPSAPATSAGASSGPCTASPSRRLTAVTRKTSWPPTLTGRAPGARPACYSCCPAHSCTASCARMRPRTLGPWSLPSSSGSGAPAEGRDLGIAFNFLCCK

SEQ ID NO: 527 - DNA, 573 bp, Homo sapiens
atgacctggaggcaccatgtcaggcttctgtttacggtcagtttggcattacagatcatcaatttgggaaacagctatcaaagagagaaacataacggcggtagagaggaagtcaccaaggttgccactcagaagcaccgacagtcaccgctcaactggacctccagtcatttcggagaggtgactgggagcgccgagggctgggggccggaggagccgctcccctactcccgggctttcggagaggtgaatgcggcgccctggagcacggagcctggaccctccgcgcctgccacctctgcaggtgcatcttcggggccctgcactgcctccccctccagacgcctgaccgctgtgacccgaaagacttcctggcctcccacgctcacgggccgagcgccgggggcgcgcccagcctgctactcttgctgccctgcgcactcctgcaccgcctcctgcgcccggatgcgcccgcgcaccctcggtccctggtcccttccgtcctccagcgggagcggcgcccctgcggaaggccgggacttgggcatcgcctttaattttctatgttgtaaa

SEQ ID NO: 528 - DNA, 498 bp, Homo sapiens
tatcaaagagagaaacataacggcggtagagaggaagtcaccaaggttgccactcagaagcaccgacagtcaccgctcaactggacctccagtcatttcggagaggtgactgggagcgccgagggctgggggccggaggagccgctcccctactcccgggctttcggagaggtgaatgcggcgccctggagcacggagcctggaccctccgcgcctgccacctctgcaggtgcatcttcggggccctgcactgcctccccctccagacgcctgaccgctgtgacccgaaagacttcctggcctcccacgctcacgggccgagcgccgggggcgcgcccagcctgctactcttgctgccctgcgcactcctgcaccgcctcctgcgcccggatgcgcccgcgcaccctcggtccctggtcccttccgtcctccagcgggagcggcgcccctgcggaaggccgggacttgggcatcgcctttaattttctatgttgtaaa

SEQ ID NO: 529 - protein, 148 aa, Homo sapiens
MTWRHHVRLLFTVSLALQIINLGNSYQREKHNGGREEVTKVATQKHRQSPLNWTSSHFGEVTGSAEGWGPEEPLPYSRAFGEDPKDFLASHAHGPSAGGAPSLLLLLPCALLHRLLRPDAPAHPRSLVPSVLQRERRPCGRPGLGHRL

SEQ ID NO: 530 - protein, 69 aa, Homo sapiens
YQREKHNGGREEVTKVATQKHRQSPLNWTSSHFGEVTGSAEGWGPEEPLPYSRAFGEDPKDFLASHAHG

SEQ ID NO: 531 - DNA, 444 bp, Homo sapiens
atgacctggaggcaccatgtcaggcttctgtttacggtcagtttggcattacagatcatcaatttgggaaacagctatcaaagagagaaacataacggcggtagagaggaagtcaccaaggttgccactcagaagcaccgacagtcaccgctcaactggacctccagtcatttcggagaggtgactgggagcgccgagggctgggggccggaggagccgctcccctactcccgggctttcggagaggacccgaaagacttcctggcctcccacgctcacgggccgagcgccgggggcgcgcccagcctgctactcttgctgccctgcgcactcctgcaccgcctcctgcgcccggatgcgcccgcgcaccctcggtccctggtcccttccgtcctccagcgggagcggcgcccctgcggaaggccgggacttgggcatcgcctt

SEQ ID NO: 532 - DNA, 207 bp, Homo sapiens
tatcaaagagagaaacataacggcggtagagaggaagtcaccaaggttgccactcagaagcaccgacagtcaccgctcaactggacctccagtcatttcggagaggtgactgggagcgccgagggctgggggccggaggagccgctcccctactcccgggctttcggagaggacccgaaagacttcctggcctcccacgctcacggg

SEQ ID NO: 533 - protein, 223 aa, Homo sapiens
MTWRHHVRLLFTVSLALQIINLGNSYQREKHNGGREEVTKVATQKHRQSPLNWTSSHFGEVTGSAEGWGPEEPLPYSWAFGEGASARPRCCRNGGTCVLGSFCVCPAHFTGRYCEHDQRRSECGALEHGAWTLRACHLCRCIFGALHCLPLQTPDRCDPKDFLASHAHGPSAGGAPSLLLLLPCALLHRLLRPDAPAHPRSLVPSVLQRERRPCGRPGLGHRL

SEQ ID NO: 534 - protein, 144 aa, Homo sapiens
YQREKHNGGREEVTKVATQKHRQSPLNWTSSHFGEVTGSAEGWGPEEPLPYSWAFGEGASARPRCCRNGGTCVLGSFCVCPAHFTGRYCEHDQRRSECGALEHGAWTLRACHLCRCIFGALHCLPLQTPDRCDPKDFLASHAHG

SEQ ID NO: 535 - DNA, 669 bp, Homo sapiens
atgacctggaggcaccatgtcaggcttctgtttacggtcagtttggcattacagatcatcaatttgggaaacagctatcaaagagagaaacataacggcggtagagaggaagtcaccaaggttgccactcagaagcaccgacagtcaccgctcaactggacctccagtcatttcggagaggtgactgggagcgccgagggctgggggccggaggagccgctcccatactcctgggctttcggagagggtgcgtccgcgcggccgcgctgctgcaggaacggcggtacctgcgtgctgggcagcttctgcgtgtgcccggcccacttcaccggccgctactgcgagcatgaccagaggcgcagtgaatgcggcgccctggagcacggagcctggaccctccgcgcctgccacctctgcaggtgcatcttcggggccctgcactgcctccccctccagacgcctgaccgctgtgacccgaaagacttcctggcctcccacgctcacgggccgagcgccgggggcgcgcccagcctgctactcttgctgccctgcgcactcctgcaccgcctcctgcgcccggatgcgcccgcgcaccctcggtccctggtcccttccgtcctccagcgggagcggcgcccctgcggaaggccgggacttgggcatcgcctt

SEQ ID NO: 536 - DNA, 432 bp, Homo sapiens
tatcaaagagagaaacataacggcggtagagaggaagtcaccaaggttgccactcagaagcaccgacagtcaccgctcaactggacctccagtcatttcggagaggtgactgggagcgccgagggctgggggccggaggagccgctcccatactcctgggctttcggagagggtgcgtccgcgcggccgcgctgctgcaggaacggcggtacctgcgtgctgggcagcttctgcgtgtgcccggcccacttcaccggccgctactgcgagcatgaccagaggcgcagtgaatgcggcgccctggagcacggagcctggaccctccgcgcctgccacctctgcaggtgcatcttcggggccctgcactgcctccccctccagacgcctgaccgctgtgacccgaaagacttcctggcctcccacgctcacggg

SEQ ID NO: 537 - protein, 1036 aa, Homo sapiens
MYLVAGDRGLAGCGHLLVSLLGLLLLLARSGTRALVCLPCDESKCEEPRNCPGSIVQGVCGCCYTCASQRNESCGGTFGIYGTCDRGLRCVIRPPLNGDSLTEYEAGVCEDENWTDDQLLGFKPCNENLIAGCNIINGKCECNTIRTCSNPFEFPSQDMCLSALKRIEEEKPDCSKARCEVQFSPRCPEDSVLIEGYAPPGECCPLPSRCVCNPAGCLRKVCQPGNLNILVSKASGKPGECCDLYECKPVFGVDCRTVECPPVQQTACPPDSYETQVRLTADGCCTLPTRCECLSGLCGFPVCEVGSTPRIVSRGDGTPGKCCDVFECVNDTKPACVFNNVEYYDGDMFRMDNCRFCRCQGGVAICFTAQCGEINCERYYVPEGECCPVCEDPVYPFNNPAGCYANGLILAHGDRWREDDCTFCQCVNGERHCVATVCGQTCTNPVKVPGECCPVCEEPTIITVDPPACGELSNCTLTGKDCINGFKRDHNGCRTCQCINTEELCSERKQGCTLNCPFGFLTDAQNCEICECRPRPKKCRPIICDKYCPLGLLKNKHGCDICRCKKCPELSCSKICPLGFQQDSHGCLICKCREASASAGPPILSGTCLTVDGHHHKNEESWHDGCRECYCLNGREMCALITCPVPACGNPTIHPGQCCPSCADDFVVQKPELSTPSICHAPGGEYFVEGETWNIDSCTQCTCHSGRVLCETEVCPPLLCQNPSRTQDSCCPQCTDQPFRPSLSRNNSVPNYCKNDEGDIFLAAESWKPDVCTSCICIDSVISCFSESCPSVSCERPVLRKGQCCPYCIEDTIPKKVVCHFSGKAYADEERWDLDSCTHCYCLQGQTLCSTVSCPPLPCVEPINVEGSCCPMCPEMYVPEPTNIPIEKTNHRGEVDLEVPLWPTPSENDIVHLPRDMGHLQVDYRDNRLHPSEDSSLDSIASVVVPIIICLSIIIAFLFINQKKQWIPLLCWYRTPTKPSSLNNQLVSVDCKKGTRVQVDSSQRMLRIAEPDARFSGFYSMQKQNHLQADNFYQTV

SEQ ID NO: 538 - protein, 904 aa, Homo sapiens
LVCLPCDESKCEEPRNCPGSIVQGVCGCCYTCASQRNESCGGTFGIYGTCDRGLRCVIRPPLNGDSLTEYEAGVCEDENWTDDQLLGFKPCNENLIAGCNIINGKCECNTIRTCSNPFEFPSQDMCLSALKRIEEEKPDCSKARCEVQFSPRCPEDSVLIEGYAPPGECCPLPSRCVCNPAGCLRKVCQPGNLNILVSKASGKPGECCDLYECKPVFGVDCRTVECPPVQQTACPPDSYETQVRLTADGCCTLPTCECLSGLCGFPVCEVGSTPRIVSRGDGTPGKCCDVFECVNDTKPACVFNNVEYYDGDMFRMDNCRFCRCQGGVAICFTAQCGEINCERYYVPEGECCPVCEDPVYPFNNPAGCYANGLILAHGDRWREDDCTFCQCVNGERHCVATVCGQTCTNPVKVPGECCPVCEEPTIITVDPPACGELSNCTLTGKDCINGFKRDHNGCRTCQCINTEELCSERKQGCTLNCPFGFLTDAQNCEICECRPRPKKCRPIICDKYCPLGLLKNKHGCDICRCKKCPELSCSKICPLGFQQDSHGCLICKCREASASAGPPILSGTCLTVDGHHHKNEESWHDGCRECYCLNGREMCALITCPVPACGNPTIHPGQCCPSCADDFVVQKPELSTPSICHAPGGEYFVEGETWNIDSCTQCTCHSGRVLCETEVCPPLLCQNPSRTQDSCCPQCTDQPFRPSLSRNNSVPNYCKNDEGDIFLAAESWKPDVCTSCICIDSVISCFSESCPSVSCERPVLRKGQCCPYCIEDTIPKKVVCHFSGKAYADEERWDLDSCTHCYCLQGQTLCSTVSCPPLPCVEPINVEGSCCPMCPEMYVPEPTNIPIEKTNHRGEVDLEVPLWPTPSENDIVHLPRDMGHLQVDYRDNRLHPSEDSSLDS

SEQ ID NO: 539 - DNA, 3108 bp, Homo sapiens
atgtacttggtggcgggggacagggggttggccggctgcgggcacctcctggtctcgctgctggggctgctgctgctgctggcgcgctccggcacccgggcgctggtctgcctgccctgtgacgagtccaagtgcgaggagcccaggaactgcccggggagcatcgtgcagggcgtctgcggctgctgctacacgtgcgccagccagaggaacgagagctgcggcggcaccttcgggatttacggaacctgcgaccgggggctgcgttgtgtcatccgccccccgctcaatggcgactccctcaccgagtacgaagcgggcgtttgcgaagatgagaactggactgatgaccaactgcttggttttaaaccatgcaatgaaaaccttattgctggctgcaatataatcaatgggaaatgtgaatgtaacaccattcgaacctgcagcaatccctttgagtttccaagtcaggatatgtgcctttcagctttaaagagaattgaagaagagaagccagattgctccaaggcccgctgtgaagtccagttctctccacgttgtcctgaagattctgttctgatcgagggttatgctcctcctggggagtgctgtcccttacccagccgctgcgtgtgcaaccccgcaggctgtctgcgcaaagtctgccagccgggaaacctgaacatactagtgtcaaaagcctcagggaagccgggagagtgctgtgacctctatgagtgcaaaccagttttcggcgtggactgcaggactgtggaatgccctcctgttcagcagaccgcgtgtcccccggacagctatgaaactcaagtcagactaactgcagatggttgctgtactttgccaacaagatgcgagtgtctctctggcttatgtggtttccccgtgtgtgaggtgggatccactccccgcatagtctctcgtggcgatgggacacctggaaagtgctgtgatgtctttgaatgtgttaatgatacaaagccagcctgcgtatttaacaatgtggaatattatgatggagacatgtttcgaatggacaactgtcggttctgtcgatgccaagggggcgttgccatctgcttcaccgcccagtgtggtgagataaactgcgagaggtactacgtgcccgaaggagagtgctgcccagtgtgtgaagatccagtgtatccttttaataatcccgctggctgctatgccaatggcctgatccttgcccacggagaccggtggcgggaagacgactgcacattctgccagtgcgtcaacggtgaacgccactgcgttgcgaccgtctgcggacagacctgcacaaaccctgtgaaagtgcctggggagtgttgccctgtgtgcgaagaaccaaccatcatcacagttgatccacctgcatgtggggagttatcaaactgcactctgacagggaaggactgcattaatggtttcaaacgcgatcacaatggttgtcggacctgtcagtgcataaacaccgaggaactatgttcagaacgtaaacaaggctgcaccttgaactgtcccttcggtttccttactgatgcccaaaactgtgagatctgtgagtgccgcccaaggcccaagaagtgcagacccataatctgtgacaagtattgtccacttggattgctgaagaataagcacggctgtgacatctgtcgctgtaagaaatgtccagagctctcatgcagtaagatctgccccttgggtttccagcaggacagtcacggctgtcttatctgcaagtgcagagaggcctctgcttcagctgggccacccatcctgtcgggcacttgtctcaccgtggatggtcatcatcataaaaatgaggagagctggcacgatgggtgccgggaatgctactgtctcaatggacgggaaatgtgtgccctgatcacctgcccggtgcctgcctgtggcaaccccaccattcaccctggacagtgctgcccatcatgtgcagatgactttgtggtgcagaagccagagctcagtactccctccatttgccacgcccctggaggagaatactttgtggaaggagaaacgtggaacattgactcctgtactcagtgcacctgccacagcggacgggtgctgtgtgagacagaggtgtgcccaccgctgctctgccagaacccctcacgcacccaggattcctgctgcccacagtgtacagatcaaccttttcggccttccttgtcccgcaataacagcgtacctaattactgcaaaaatgatgaaggggatatattcctggcagctgagtcctggaagcctgacgtttgtaccagctgcatctgcattgatagcgtaattagctgtttctctgagtcctgcccttctgtatcctgtgaaagacctgtcttgagaaaaggccagtgttgtccctactgcatagaagacacaattccaaagaaggtggtgtgccacttcagtgggaaggcctatgccgacgaggagcggtgggaccttgacagctgcacccactgctactgcctgcagggccagaccctctgctcgaccgtcagctgcccccctctgccctgtgttgagcccatcaacgtggaaggaagttgctgcccaatgtgtccagaaatgtatgtcccagaaccaaccaatatacccattgagaagacaaaccatcgaggagaggttgacctggaggttcccctgtggcccacgcctagtgaaaatgatatcgtccatctccctagagatatgggtcacctccaggtagattacagagataacaggctgcacccaagtgaagattcttcactggactccattgcctcagttgtggttcccataattatatgcctctctattataatagcattcctattcatcaatcagaagaaacagtggataccactgctttgctggtatcgaacaccaactaagccttcttccttaaataatcagctagtatctgtggactgcaagaaaggaaccagagtccaggtggacagttcccagagaatgctaagaattgcagaaccagatgcaagattcagtggcttctacagcatgcaaaaacagaaccatctacaggcagacaatttctaccaaacagtg

SEQ ID NO: 540 - DNA, 2715 bp, Homo sapiens
ctggtctgcctgccctgtgacgagtccaagtgcgaggagcccaggaactgcccggggagcatcgtgcagggcgtctgcggctgctgctacacgtgcgccagccagaggaacgagagctgcggcggcaccttcgggatttacggaacctgcgaccgggggctgcgttgtgtcatccgccccccgctcaatggcgactccctcaccgagtacgaagcgggcgtttgcgaagatgagaactggactgatgaccaactgcttggttttaaaccatgcaatgaaaaccttattgctggctgcaatataatcaatgggaaatgtgaatgtaacaccattcgaacctgcagcaatccctttgagtttccaagtcaggatatgtgcctttcagctttaaagagaattgaagaagagaagccagattgctccaaggcccgctgtgaagtccagttctctccacgttgtcctgaagattctgttctgatcgagggttatgctcctcctggggagtgctgtcccttacccagccgctgcgtgtgcaaccccgcaggctgtctgcgcaaagtctgccagccgggaaacctgaacatactagtgtcaaaagcctcagggaagccgggagagtgctgtgacctctatgagtgcaaaccagttttcggcgtggactgcaggactgtggaatgccctcctgttcagcagaccgcgtgtcccccggacagctatgaaactcaagtcagactaactgcagatggttgctgtactttgccaacaagatgcgagtgtctctctggcttatgtggtttccccgtgtgtgaggtgggatccactccccgcatagtctctcgtggcgatgggacacctggaaagtgctgtgatgtctttgaatgtgttaatgatacaaagccagcctgcgtatttaacaatgtggaatattatgatggagacatgtttcgaatggacaactgtcggttctgtcgatgccaagggggcgttgccatctgcttcaccgcccagtgtggtgagataaactgcgagaggtactacgtgcccgaaggagagtgctgcccagtgtgtgaagatccagtgtatccttttaataatcccgctggctgctatgccaatggcctgatccttgcccacggagaccggtggcgggaagacgactgcacattctgccagtgcgtcaacggtgaacgccactgcgttgcgaccgtctgcggacagacctgcacaaaccctgtgaaagtgcctggggagtgttgccctgtgtgcgaagaaccaaccatcatcacagttgatccacctgcatgtggggagttatcaaactgcactctgacagggaaggactgcattaatggtttcaaacgcgatcacaatggttgtcggacctgtcagtgcataaacaccgaggaactatgttcagaacgtaaacaaggctgcaccttgaactgtcccttcggtttccttactgatgcccaaaactgtgagatctgtgagtgccgcccaaggcccaagaagtgcagacccataatctgtgacaagtattgtccacttggattgctgaagaataagcacggctgtgacatctgtcgctgtaagaaatgtccagagctctcatgcagtaagatctgccccttgggtttccagcaggacagtcacggctgtcttatctgcaagtgcagagaggcctctgcttcagctgggccacccatcctgtcgggcacttgtctcaccgtggatggtcatcatcataaaaatgaggagagctggcacgatgggtgccgggaatgctactgtctcaatggacgggaaatgtgtgccctgatcacctgcccggtgcctgcctgtggcaaccccaccattcaccctggacagtgctgcccatcatgtgcagatgactttgtggtgcagaagccagagctcagtactccctccatttgccacgcccctggaggagaatactttgtggaaggagaaacgtggaacattgactcctgtactcagtgcacctgccacagcggacgggtgctgtgtgagacagaggtgtgcccaccgctgctctgccagaacccctcacgcacccaggattcctgctgcccacagtgtacagatcaaccttttcggccttccttgtcccgcaataacagcgtacctaattactgcaaaaatgatgaaggggatatattcctggcagctgagtcctggaagcctgacgtttgtaccagctgcatctgcattgatagcgtaattagctgtttctctgagtcctgcccttctgtatcctgtgaaagacctgtcttgagaaaaggccagtgttgtccctactgcatagaagacacaattccaaagaaggtggtgtgccacttcagtgggaaggcctatgccgacgaggagcggtgggaccttgacagctgcacccactgctactgcctgcagggccagaccctctgctcgaccgtcagctgcccccctctgccctgtgttgagcccatcaacgtggaaggaagttgctgcccaatgtgtccagaaatgtatgtcccagaaccaaccaatatacccattgagaagacaaaccatcgaggagaggttgacctggaggttcccctgtggcccacgcctagtgaaaatgatatcgtccatctccctagagatatgggtcacctccaggtagattacagagataacaggctgcacccaagtgaagattcttcactggactcc

SEQ ID NO: 541 - protein, 1503 aa, Homo sapiens
MAGVGAAALSLLLHLGALALAAGAEGGAVPREPPGQQTTAHSSVLAGNSQEQWHPLREWLGRLEAAVMELREQNKDLQTRVRQLESCECHPASPQCWGLGRAWPEGARWEPDACTACVCQDGAAHCGPQAHLPHCRGCSQNGQTYGNGETFSPDACTTCRCLTGAVQCQGPSCSELNCLESCTPPGECCPICCTEGGSHWEHGQEWTTPGDPCRICRCLEGHIQCRQRECASLCPYPARPLPGTCCPVCDGCFLNGREHRSGEPVGSGDPCSHCRCANGSVQCEPLPCPPVPCRHPGKIPGQCCPVCDGCEYQGHQYQSQETFRLQERGLCVRCSCQAGEVSCEEQECPVTPCALPASGRQLCPACELDGEEFAEGVQWEPDGRPCTACVCQDGVPKCGAVLCPPAPCQHPTQPPGACCPSCDSCTYHSQVYANGQNFTDADSPCHACHCQDGTVTCSLVDCPPTTCARPQSGPGQCCPRCPDCILEEEVFVDGESFSHPRDPCQECRCQEGHAHCQPRPCPRAPCAHPLPGTCCPNDCSGCAFGGKEYPSGADFPHPSDPCRLCRCLSGNVQCLARRCVPLPCPEPVLLPGECCPQCPAPAGCPRPGAAHARHQEYFSPPGDPCRRCLCLDGSVSCQRLPCPPAPCAHPRQGPCCPSCDGCLYQGKEFASGERFPSPTAACHLCLCWEGSVSCEPKACAPALCPFPARGDCCPDCDGCEYLGESYLSNQEFPDPREPCNLCTCLGGFVTCGRRPCEPPGCSHPLIPSGHCCPTCQGCRYHGVTTASGETLPDPLDPTCSLCTCQEGSMRCQKKPCPPALCPHPSPGPCFCPVCHSCLSQGREHQDGEEFEGPAGSCEWCRCQAGQVSCVRLQCPPLPCKLQVTERGSCCPRCRGCLAHGEEHPEGSRWVPPDSACSSCVCHEGVVTCARIQCISSCAQPRQGPHDCCPQCSDCEHEGRKYEPGESFQPGADPCEVCICEPQPEGPPSLRCHRRQCPSLVGCPPSQLLPPGPQHCCPTCAEALSNCSEGLLGSELAPPDPCYTCQCQDLTWLCIHQACPELSCPLSERHTPPGSCCPVCRAPTQSCVHQGREVASGERWTVDTCTSCSCMAGTVRCQSQRCSPLSCGPDKAPALSPGSCCPRCLPRPASCMAFGDPHYRTFDGRLLHFQGSCSYVLAKDCHSGDFSVHVTNDDRGRSGVAWTQEVAVLLGDMAVRLLQDGAVTVDGHPVALPFLQEPLLYVELRGHTVILHAQPGLQVLWDGQSQVEVSVPGSYQGRTCGLCGNFNGFAQDDLQGPEGLLLPSEAAFGNSWQVSEGLWPGRPCSAGREVDPCRAAGYRARREANARCGVLKSSPFSRCHAVVPPEPFFAACVYDLCACGPGSSADACLCDALEAYASHCRQAGVTPTWRGPTLCVVGCPLERGFVFDECGPPCPRTCFNQHIPLGELAAHCVRPCVPGCQCPAGLVEHEAHCIPPEACPQVLLTGDQPLGARPSPSREPQETP

SEQ ID NO: 542 - protein, 1477 aa, Homo sapiens
GAVPREPPGQQTTAHSSVLAGNSQEQWHPLREWLGRLEAAVMELREQNKDLQTRVRQLESCECHPASPQCWGLGRAWPEGARWEPDACTACVCQDGAAHCGPQAHLPHCRGCSQNGQTYGNGETFSPDACTTCRCLTGAVQCQGPSCSELNCLESCTPPGECCPICCTEGGSHWEHGQEWTTPGDPCRICRCLEGHIQCRQRECASLCPYPARPLPGTCCPVCDGCFLNGREHRSGEPVGSGDPCSHCRCANGSVQCEPLPCPPVPCRHPGKIPGQCCPVCDGCEYQGHQYQSQETFRLQERGLCVRCSCQAGEVSCEEQECPVTPCALPASGRQLCPACELDGEEFAEGVQWEPDGRPCTACVCQDGVPKCGAVLCPPAPCQHPTQPPGACCPSCDSCTYHSQVYANGQNFTDADSPCHACHCQDGTVTCSLVDCPPTTCARPQSGPGQCCPRCPDCILEEEVFVDGESFSHPRDPCQECRCQEGHAHCQPRPCPRAPCAHPLPGTCCPNDCSGCAFGGKEYPSGADFPHPSDPCRLCRCLSGNVQCLARRCVPLPCPEPVLLPGECCPQCPAPAGCPRPGAAHARHQEYFSPPGDPCRRCLCLDGSVSCQRLPCPPAPCAHPRQGPCCPSCDGCLYQGKEFASGERFPSPTAACHLCLCWEGSVSCEPKACAPALCPFPARGDCCPDCDGCEYLGESYLSNQEFPDPREPCNLCTCLGGFVTCGRRPCEPPGCSHPLIPSGHCCPTCQGCRYHGVTTASGETLPDPLDPTCSLCTCQEGSMRCQKKPCPPALCPHPSPGPCFCPVCHSCLSQGREHQDGEEFEGPAGSCEWCRCQAGQVSCVRLQCPPLPCKLQVTERGSCCPRCRGCLAHGEEHPEGSRWVPPDSACSSCVCHEGVVTCARIQCISSCAQPRQGPHDCCPQCSDCEHEGRKYEPGESFQPGADPCEVCICEPQPEGPPSLRCHRRQCPSLVGCPPSQLLPPGPQHCCPTCAEALSNCSEGLLGSELAPPDPCYTCQCQDLTWLCIHQACPELSCPLSERHTPPGSCCPVCRAPTQSCVHQGREVASGERWTVDTCTSCSCMAGTVRCQSQRCSPLSCGPDKAPALSPGSCCPRCLPRPASCMAFGDPHYRTFDGRLLHFQGSCSYVLAKDCHSGDFSVHVTNDDRGRSGVAWTQEVAVLLGDMAVRLLQDGAVTVDGHPVALPFLQEPLLYVELRGHTVILHAQPGLQVLWDGQSQVEVSVPGSYQGRTCGLCGNFNGFAQDDLQGPEGLLLPSEAAFGNSWQVSEGLWPGRPCSAGREVDPCRAAGYRARREANARCGVLKSSPFSRCHAVVPPEPFFAACVYDLCACGPGSSADACLCDALEAYASHCRQAGVTPTWRGPTLCVVGCPLERGFVFDECGPPCPRTCFNQHIPLGELAAHCVRPCVPGCQCPAGLVEHEAHCIPPEACPQVLLTGDQPLGARPSPSREPQETP

SEQ ID NO: 543 - DNA, 4509 bp, Homo sapiens
atggccggggtcggggccgctgcgctgtcccttctcctgcacctcggggccctggcgctggccgcgggcgcggaaggtggggctgtccccagggagccccctgggcagcagacaactgcccattcctcagtccttgctgggaactcccaggagcagtggcaccccctgcgagagtggctggggcgactggaggctgcagtgatggagctcagagaacagaataaggacctgcagacgagggtgaggcagctggagtcctgtgagtgccaccctgcatctccccagtgctgggggctggggcgtgcctggcccgagggggcacgctgggagcctgacgcctgcacagcctgcgtctgccaggatggggccgctcactgtggcccccaagcacacctgccccattgcaggggctgcagccaaaatggccagacctacggcaacggggagaccttctccccagatgcctgcaccacctgccgctgtctgacaggagccgtgcagtgccaggggccctcgtgttcagagctcaactgcttggagagctgcaccccacctggggagtgctgccccatctgctgcacagaaggtggctctcactgggaacatggccaagagtggacaacacctggggacccctgccgaatctgccggtgcctggagggtcacatccagtgccgccagcgagaatgtgccagcctgtgtccatacccagcccggcccctcccaggcacctgctgccctgtgtgtgatggctgtttcctaaacgggcgggagcaccgcagcggggagcctgtgggctcaggggacccctgctcgcactgccgctgtgctaatgggagtgtccagtgtgagcctctgccctgcccgccagtgccctgcagacacccaggcaagatccctgggcagtgctgccctgtctgcgatggctgtgagtaccagggacaccagtatcagagccaggagaccttcagactccaagagcggggcctctgtgtccgctgctcctgccaggctggcgaggtctcctgtgaggagcaggagtgcccagtcaccccctgtgccctgcctgcctctggccgccagctctgcccagcctgtgagctggatggagaggagtttgctgagggagtccagtgggagcctgatggtcggccctgcaccgcctgcgtctgtcaagatggggtacccaagtgcggggctgtgctctgccccccagccccctgccagcaccccacccagccccctggtgcctgctgccccagctgtgacagctgcacctaccacagccaagtgtatgccaatgggcagaacttcacggatgcagacagcccttgccatgcctgccactgtcaggatggaactgtgacatgctccttggttgactgccctcccacgacctgtgccaggccccagagtggaccaggccagtgttgccccaggtgcccagactgcatcctggaggaagaggtgtttgtggacggcgagagcttctcccacccccgagacccctgccaggagtgccgatgccaggaaggccatgcccactgccagcctcgcccctgccccagggccccctgtgcccacccgctgcctgggacctgctgcccgaacgactgcagcggctgtgcctttggcgggaaagagtaccccagcggagcggacttcccccacccctctgacccctgccgtctgtgtcgctgtctgagcggcaacgtgcagtgcctggcccgccgctgcgtgccgctgccctgtccagagcctgtcctgctgccgggagagtgctgcccgcagtgcccagcccccgccggctgcccacggcccggcgcggcccacgcccgccaccaggagtacttctccccgcccggcgatccctgccgccgctgcctctgcctcgacggctccgtgtcctgccagcggctgccctgcccgcccgcgccctgcgcgcacccgcgccaggggccttgctgcccctcctgcgacggctgcctgtaccaggggaaggagtttgccagcggggagcgcttcccatcgcccactgctgcctgccacctctgcctttgctgggagggcagcgtgagctgcgagcccaaggcatgtgcccctgcactgtgccccttccctgccaggggcgactgctgccctgactgtgatggctgtgagtacctgggggagtcctacctgagtaaccaggagttcccagacccccgagaaccctgcaacctgtgtacctgtcttggaggcttcgtgacctgcggccgccggccctgtgagcctccgggctgcagccacccactcatcccctctgggcactgctgcccgacctgccagggatgccgctaccatggcgtcactactgcctccggagagacccttcctgacccacttgaccctacctgctccctctgcacctgccaggaaggttccatgcgctgccagaagaagccatgtcccccagctctctgcccccacccctctccaggcccctgcttctgccctgtttgccacagctgtctctctcagggccgggagcaccaggatggggaggagtttgagggaccagcaggcagctgtgagtggtgtcgctgtcaggctggccaggtcagctgtgtgcggctgcagtgcccaccccttccctgcaagctccaggtcaccgagcgggggagctgctgccctcgctgcagaggctgcctggctcatggggaagagcaccccgaaggcagtagatgggtgccccccgacagtgcctgctcctcctgtgtgtgtcacgagggcgtcgtcacctgtgcacgcatccagtgcatcagctcttgcgcccagccccgccaagggccccatgactgctgtcctcaatgctctgactgtgagcatgagggccggaagtacgagcctggggagagcttccagcctggggcagacccctgtgaagtgtgcatctgcgagccacagcctgaggggcctcccagccttcgctgtcaccggcggcagtgtcccagcctggtgggctgcccccccagccagctcctgccccctgggccccagcactgctgtcccacctgtgccgaggccttgagtaactgttcagagggcctgctgggatctgagctagccccaccagacccctgctacacgtgccagtgccaggacctgacatggctctgcatccaccaggcttgtcctgagctcagctgtcccctctcagagcgccacactccccctgggagctgctgccccgtatgccgggctcccacccagtcctgcgtgcaccagggccgtgaggtggcctctggagagcgctggactgtggacacctgcaccagctgctcctgcatggcgggcaccgtgcgttgccagagccagcgctgctcaccgctctcgtgtggccccgacaaggcccctgccctgagtcctggcagctgctgcccccgctgcctgcctcggcccgcttcctgcatggccttcggagacccccattaccgcaccttcgacggccgcctgctgcacttccagggcagttgcagctatgtgctggccaaggactgccacagcggggacttcagtgtgcacgtgaccaatgatgaccggggccggagcggtgtggcctggacccaggaggtggcggtgctgctgggagacatggccgtgcggctgctgcaggacggggcagtcacggtggatgggcacccggtggccttgcccttcctgcaggagccgctgctgtatgtggagctgcgaggacacactgtgatcctgcacgcccagcccgggctccaggtgctgtgggatgggcagtcccaggtggaggtgagcgtacctggctcctaccagggccggacttgtgggctctgtgggaacttcaatggctttgcccaggacgatctgcagggccctgaggggctgctcctgccctcggaggctgcgtttgggaatagctggcaggtctcagaggggctgtggcctggccggccctgttctgcaggccgagaggtggatccgtgccgggcagcaggttaccgtgccaggcgtgaggccaatgcccggtgtggggtgctgaagtcctccccattcagtcgctgccatgctgtggtgccaccggagcccttctttgccgcctgtgtgtatgacctgtgtgcctgtggccctggctcctccgctgatgcctgcctctgtgatgccctggaagcctacgccagtcactgtcgccaggcaggagtgacacctacctggcgaggccccacgctgtgtgtggtaggctgccccctggagcgtggcttcgtgtttgatgagtgcggcccaccctgtccccgcacctgcttcaatcagcatatccccctgggggagctggcagcccactgcgtgaggccctgcgtgcccggctgccagtgccctgcaggcctggtggagcatgaggcccactgcatcccacccgaggcctgcccccaagtcctgctcactggagaccagccacttggtgctcggcccagccccagccgggagccccaggagacaccc

SEQ ID NO: 544 - DNA, 4431 bp, Homo sapiens
ggggctgtccccagggagccccctgggcagcagacaactgcccattcctcagtccttgctgggaactcccaggagcagtggcaccccctgcgagagtggctggggcgactggaggctgcagtgatggagctcagagaacagaataaggacctgcagacgagggtgaggcagctggagtcctgtgagtgccaccctgcatctccccagtgctgggggctggggcgtgcctggcccgagggggcacgctgggagcctgacgcctgcacagcctgcgtctgccaggatggggccgctcactgtggcccccaagcacacctgccccattgcaggggctgcagccaaaatggccagacctacggcaacggggagaccttctccccagatgcctgcaccacctgccgctgtctgacaggagccgtgcagtgccaggggccctcgtgttcagagctcaactgcttggagagctgcaccccacctggggagtgctgccccatctgctgcacagaaggtggctctcactgggaacatggccaagagtggacaacacctggggacccctgccgaatctgccggtgcctggagggtcacatccagtgccgccagcgagaatgtgccagcctgtgtccatacccagcccggcccctcccaggcacctgctgccctgtgtgtgatggctgtttcctaaacgggcgggagcaccgcagcggggagcctgtgggctcaggggacccctgctcgcactgccgctgtgctaatgggagtgtccagtgtgagcctctgccctgcccgccagtgccctgcagacacccaggcaagatccctgggcagtgctgccctgtctgcgatggctgtgagtaccagggacaccagtatcagagccaggagaccttcagactccaagagcggggcctctgtgtccgctgctcctgccaggctggcgaggtctcctgtgaggagcaggagtgcccagtcaccccctgtgccctgcctgcctctggccgccagctctgcccagcctgtgagctggatggagaggagtttgctgagggagtccagtgggagcctgatggtcggccctgcaccgcctgcgtctgtcaagatggggtacccaagtgcggggctgtgctctgccccccagccccctgccagcaccccacccagccccctggtgcctgctgccccagctgtgacagctgcacctaccacagccaagtgtatgccaatgggcagaacttcacggatgcagacagcccttgccatgcctgccactgtcaggatggaactgtgacatgctccttggttgactgccctcccacgacctgtgccaggccccagagtggaccaggccagtgttgccccaggtgcccagactgcatcctggaggaagaggtgtttgtggacggcgagagcttctcccacccccgagacccctgccaggagtgccgatgccaggaaggccatgcccactgccagcctcgcccctgccccagggccccctgtgcccacccgctgcctgggacctgctgcccgaacgactgcagcggctgtgcctttggcgggaaagagtaccccagcggagcggacttcccccacccctctgacccctgccgtctgtgtcgctgtctgagcggcaacgtgcagtgcctggcccgccgctgcgtgccgctgccctgtccagagcctgtcctgctgccgggagagtgctgcccgcagtgcccagcccccgccggctgcccacggcccggcgcggcccacgcccgccaccaggagtacttctccccgcccggcgatccctgccgccgctgcctctgcctcgacggctccgtgtcctgccagcggctgccctgcccgcccgcgccctgcgcgcacccgcgccaggggccttgctgcccctcctgcgacggctgcctgtaccaggggaaggagtttgccagcggggagcgcttcccatcgcccactgctgcctgccacctctgcctttgctgggagggcagcgtgagctgcgagcccaaggcatgtgcccctgcactgtgccccttccctgccaggggcgactgctgccctgactgtgatggctgtgagtacctgggggagtcctacctgagtaaccaggagttcccagacccccgagaaccctgcaacctgtgtacctgtcttggaggcttcgtgacctgcggccgccggccctgtgagcctccgggctgcagccacccactcatcccctctgggcactgctgcccgacctgccagggatgccgctaccatggcgtcactactgcctccggagagacccttcctgacccacttgaccctacctgctccctctgcacctgccaggaaggttccatgcgctgccagaagaagccatgtcccccagctctctgcccccacccctctccaggcccctgcttctgccctgtttgccacagctgtctctctcagggccgggagcaccaggatggggaggagtttgagggaccagcaggcagctgtgagtggtgtcgctgtcaggctggccaggtcagctgtgtgcggctgcagtgcccaccccttccctgcaagctccaggtcaccgagcgggggagctgctgccctcgctgcagaggctgcctggctcatggggaagagcaccccgaaggcagtagatgggtgccccccgacagtgcctgctcctcctgtgtgtgtcacgagggcgtcgtcacctgtgcacgcatccagtgcatcagctcttgcgcccagccccgccaagggccccatgactgctgtcctcaatgctctgactgtgagcatgagggccggaagtacgagcctggggagagcttccagcctggggcagacccctgtgaagtgtgcatctgcgagccacagcctgaggggcctcccagccttcgctgtcaccggcggcagtgtcccagcctggtgggctgcccccccagccagctcctgccccctgggccccagcactgctgtcccacctgtgccgaggccttgagtaactgttcagagggcctgctgggatctgagctagccccaccagacccctgctacacgtgccagtgccaggacctgacatggctctgcatccaccaggcttgtcctgagctcagctgtcccctctcagagcgccacactccccctgggagctgctgccccgtatgccgggctcccacccagtcctgcgtgcaccagggccgtgaggtggcctctggagagcgctggactgtggacacctgcaccagctgctcctgcatggcgggcaccgtgcgttgccagagccagcgctgctcaccgctctcgtgtggccccgacaaggcccctgccctgagtcctggcagctgctgcccccgctgcctgcctcggcccgcttcctgcatggccttcggagacccccattaccgcaccttcgacggccgcctgctgcacttccagggcagttgcagctatgtgctggccaaggactgccacagcggggacttcagtgtgcacgtgaccaatgatgaccggggccggagcggtgtggcctggacccaggaggtggcggtgctgctgggagacatggccgtgcggctgctgcaggacggggcagtcacggtggatgggcacccggtggccttgcccttcctgcaggagccgctgctgtatgtggagctgcgaggacacactgtgatcctgcacgcccagcccgggctccaggtgctgtgggatgggcagtcccaggtggaggtgagcgtacctggctcctaccagggccggacttgtgggctctgtgggaacttcaatggctttgcccaggacgatctgcagggccctgaggggctgctcctgccctcggaggctgcgtttgggaatagctggcaggtctcagaggggctgtggcctggccggccctgttctgcaggccgagaggtggatccgtgccgggcagcaggttaccgtgccaggcgtgaggccaatgcccggtgtggggtgctgaagtcctccccattcagtcgctgccatgctgtggtgccaccggagcccttctttgccgcctgtgtgtatgacctgtgtgcctgtggccctggctcctccgctgatgcctgcctctgtgatgccctggaagcctacgccagtcactgtcgccaggcaggagtgacacctacctggcgaggccccacgctgtgtgtggtaggctgccccctggagcgtggcttcgtgtttgatgagtgcggcccaccctgtccccgcacctgcttcaatcagcatatccccctgggggagctggcagcccactgcgtgaggccctgcgtgcccggctgccagtgccctgcaggcctggtggagcatgaggcccactgcatcccacccgaggcctgcccccaagtcctgctcactggagaccagccacttggtgctcggcccagccccagccgggagccccaggagacaccc

SEQ ID NO: 545 - protein, 814 aa, Homo sapiens
MAGVGAAALSLLLHLGALALAAGAEGGAVPREPPGQQTTAHSSVLAGNSQEQWHPLREWLGRLEAAVMELREQNKDLQTRVRQLESCECHPASPQCWGLGRAWPEGARWEPDACTACVCQDGAAHCGPQAHLPHCRGCSQNGQTYGNGETFSPDACTTCRCLEGTITCNQKPCPRGPCPEPGACCPHCKPGCDYEGQLYEEGVTFLSSSNPCLQCTCLRSRVRCMALKCPPSPCPEPVLRPGHCCPTCQGCTEGGSHWEHGQEWTTPGDPCRICRCLEGHIQCRQRECASLCPYPARPLPGTCCPVCDGCFLNGREHRSGEPVGSGDPCSHCRCANGSVQCEPLPCPPVPCRHPGKIPGQCCPVCDGCEYQGHQYQSQETFRLQERGLCVRCSCQAGEVSCEEQECPVTPCALPASGRQLCPACELDGEEFAEGVQWEPDGRPCTACVCQDGVPKCGAVLCPPAPCQHPTQPPGACCPSCDSCTYHSQVYANGQNFTDADSPCHACHCQDGTVTCSLVDCPPTTCARPQSGPGQCCPRCPDCILEEEVFVDGESFSHPRDPCQECRCQEGHAHCQPRPCPRAPCAHPLPGTCCPNDCSGCAFGGKEYPSGADFPHPSDPCRLCRCLSGNVQCLARRCVPLPCPEPVLLPGECCPQCPAAPAPAGCPRPGAAHARHQEYFSPPGDPCRRCLCLDGSVSCQRLPCPPAPCAHPRQGPCCPSCDGCLYQGKEFASGERFPSPTAACHLCLCWEGSVSCEPKACAPALCPFPARGDCCPDCDGEGHGIGSCRGGMRETRGLGQNNLYCPRVDLKYLLQ

SEQ ID NO: 546 - protein, 791 aa, Homo sapiens
AEGGAVPREPPGQQTTAHSSVLAGNSQEQWHPLREWLGRLEAAVMELREQNKDLQTRVRQLESCECHPASPQCWGLGRAWPEGARWEPDACTACVCQDGAAHCGPQAHLPHCRGCSQNGQTYGNGETFSPDACTTCRCLEGTITCNQKPCPRGPCPEPGACCPHCKPGCDYEGQLYEEGVTFLSSSNPCLQCTCLRSRVRCMALKCPPSPCPEPVLRPGHCCPTCQGCTEGGSHWEHGQEWTTPGDPCRICRCLEGHIQCRQRECASLCPYPARPLPGTCCPVCDGCFLNGREHRSGEPVGSGDPCSHCRCANGSVQCEPLPCPPVPCRHPGKIPGQCCPVCDGCEYQGHQYQSQETFRLQERGLCVRCSCQAGEVSCEEQECPVTPCALPASGRQLCPACELDGEEFAEGVQWEPDGRPCTACVCQDGVPKCGAVLCPPAPCQHPTQPPGACCPSCDSCTYHSQVYANGQNFTDADSPCHACHCQDGTVTCSLVDCPPTTCARPQSGPGQCCPRCPDCILEEEVFVDGESFSHPRDPCQECRCQEGHAHCQPRPCPRAPCAHPLPGTCCPNDCSGCAFGGKEYPSGADFPHPSDPCRLCRCLSGNVQCLARRCVPLPCPEPVLLPGECCPQCPAAPAPAGCPRPGAAHARHQEYFSPPGDPCRRCLCLDGSVSCQRLPCPPAPCAHPRQGPCCPSCDGCLYQGKEFASGERFPSPTAACHLCLCWEGSVSCEPKACAPALCPFPARGDCCPDCDGEGHGIGSCRGGMRETRGLGQNNLYCPRVDLKYLLQ

SEQ ID NO: 547 - DNA, 2442 bp, Homo sapiens
atggccggggtcggggccgctgcgctgtcccttctcctgcacctcggggccctggcgctggccgcgggcgcggaaggtggggctgtccccagggagccccctgggcagcagacaactgcccattcctcagtccttgctgggaactcccaggagcagtggcaccccctgcgagagtggctggggcgactggaggctgcagtgatggagctcagagaacagaataaggacctgcagacgagggtgaggcagctggagtcctgtgagtgccaccctgcatctccccagtgctgggggctggggcgtgcctggcccgagggggcacgctgggagcctgacgcctgcacagcctgcgtctgccaggatggggccgctcactgtggcccccaagcacacctgccccattgcaggggctgcagccaaaatggccagacctacggcaacggggagaccttctccccagatgcctgcaccacctgccgctgtctggaaggtaccatcacttgcaaccagaagccatgcccaagaggaccctgccctgagccaggagcatgctgcccgcactgtaagccaggctgtgattatgaggggcagctttatgaggagggggtcaccttcctgtccagctccaacccttgtctacagtgcacctgcctgaggagccgagttcgctgcatggccctgaagtgcccgcctagcccctgcccagagccagtgctgaggcctgggcactgctgcccaacctgccaaggctgcacagaaggtggctctcactgggaacatggccaagagtggacaacacctggggacccctgccgaatctgccggtgcctggagggtcacatccagtgccgccagcgagaatgtgccagcctgtgtccatacccagcccggcccctcccaggcacctgctgccctgtgtgtgatggctgtttcctaaacgggcgggagcaccgcagcggggagcctgtgggctcaggggacccctgctcgcactgccgctgtgctaatgggagtgtccagtgtgagcctctgccctgcccgccagtgccctgcagacacccaggcaagatccctgggcagtgctgccctgtctgcgatggctgtgagtaccagggacaccagtatcagagccaggagaccttcagactccaagagcggggcctctgtgtccgctgctcctgccaggctggcgaggtctcctgtgaggagcaggagtgcccagtcaccccctgtgccctgcctgcctctggccgccagctctgcccagcctgtgagctggatggagaggagtttgctgagggagtccagtgggagcctgatggtcggccctgcaccgcctgcgtctgtcaagatggggtacccaagtgcggggctgtgctctgccccccagccccctgccagcaccccacccagccccctggtgcctgctgccccagctgtgacagctgcacctaccacagccaagtgtatgccaatgggcagaacttcacggatgcagacagcccttgccatgcctgccactgtcaggatggaactgtgacatgctccttggttgactgccctcccacgacctgtgccaggccccagagtggaccaggccagtgttgccccaggtgcccagactgcatcctggaggaagaggtgtttgtggacggcgagagcttctcccacccccgagacccctgccaggagtgccgatgccaggaaggccatgcccactgccagcctcgcccctgccccagggccccctgtgcccacccgctgcctgggacctgctgcccgaacgactgcagcggctgtgcctttggcgggaaagagtaccccagcggagcggacttcccccacccctctgacccctgccgtctgtgtcgctgtctgagcggcaacgtgcagtgcctggcccgccgctgcgtgccgctgccctgtccagagcctgtcctgctgccgggagagtgctgcccgcagtgcccagccgccccagcccccgccggctgcccacggcccggcgcggcccacgcccgccaccaggagtacttctccccgcccggcgatccctgccgccgctgcctctgcctcgacggctccgtgtcctgccagcggctgccctgcccgcccgcgccctgcgcgcacccgcgccaggggccttgctgcccctcctgcgacggctgcctgtaccaggggaaggagtttgccagcggggagcgcttcccatcgcccactgctgcctgccacctctgcctttgctgggagggcagcgtgagctgcgagcccaaggcatgtgcccctgcactgtgccccttccctgccaggggcgactgctgccctgactgtgatggtgagggtcatgggatagggagctgccggggtgggatgcgggagaccagagggctgggtcagaataatctttactgccctagggtggatctaaaatatttattacag

SEQ ID NO: 548 - DNA, 2373 bp, Homo sapiens
gcggaaggtggggctgtccccagggagccccctgggcagcagacaactgcccattcctcagtccttgctgggaactcccaggagcagtggcaccccctgcgagagtggctggggcgactggaggctgcagtgatggagctcagagaacagaataaggacctgcagacgagggtgaggcagctggagtcctgtgagtgccaccctgcatctccccagtgctgggggctggggcgtgcctggcccgagggggcacgctgggagcctgacgcctgcacagcctgcgtctgccaggatggggccgctcactgtggcccccaagcacacctgccccattgcaggggctgcagccaaaatggccagacctacggcaacggggagaccttctccccagatgcctgcaccacctgccgctgtctggaaggtaccatcacttgcaaccagaagccatgcccaagaggaccctgccctgagccaggagcatgctgcccgcactgtaagccaggctgtgattatgaggggcagctttatgaggagggggtcaccttcctgtccagctccaacccttgtctacagtgcacctgcctgaggagccgagttcgctgcatggccctgaagtgcccgcctagcccctgcccagagccagtgctgaggcctgggcactgctgcccaacctgccaaggctgcacagaaggtggctctcactgggaacatggccaagagtggacaacacctggggacccctgccgaatctgccggtgcctggagggtcacatccagtgccgccagcgagaatgtgccagcctgtgtccatacccagcccggcccctcccaggcacctgctgccctgtgtgtgatggctgtttcctaaacgggcgggagcaccgcagcggggagcctgtgggctcaggggacccctgctcgcactgccgctgtgctaatgggagtgtccagtgtgagcctctgccctgcccgccagtgccctgcagacacccaggcaagatccctgggcagtgctgccctgtctgcgatggctgtgagtaccagggacaccagtatcagagccaggagaccttcagactccaagagcggggcctctgtgtccgctgctcctgccaggctggcgaggtctcctgtgaggagcaggagtgcccagtcaccccctgtgccctgcctgcctctggccgccagctctgcccagcctgtgagctggatggagaggagtttgctgagggagtccagtgggagcctgatggtcggccctgcaccgcctgcgtctgtcaagatggggtacccaagtgcggggctgtgctctgccccccagccccctgccagcaccccacccagccccctggtgcctgctgccccagctgtgacagctgcacctaccacagccaagtgtatgccaatgggcagaacttcacggatgcagacagcccttgccatgcctgccactgtcaggatggaactgtgacatgctccttggttgactgccctcccacgacctgtgccaggccccagagtggaccaggccagtgttgccccaggtgcccagactgcatcctggaggaagaggtgtttgtggacggcgagagcttctcccacccccgagacccctgccaggagtgccgatgccaggaaggccatgcccactgccagcctcgcccctgccccagggccccctgtgcccacccgctgcctgggacctgctgcccgaacgactgcagcggctgtgcctttggcgggaaagagtaccccagcggagcggacttcccccacccctctgacccctgccgtctgtgtcgctgtctgagcggcaacgtgcagtgcctggcccgccgctgcgtgccgctgccctgtccagagcctgtcctgctgccgggagagtgctgcccgcagtgcccagccgccccagcccccgccggctgcccacggcccggcgcggcccacgcccgccaccaggagtacttctccccgcccggcgatccctgccgccgctgcctctgcctcgacggctccgtgtcctgccagcggctgccctgcccgcccgcgccctgcgcgcacccgcgccaggggccttgctgcccctcctgcgacggctgcctgtaccaggggaaggagtttgccagcggggagcgcttcccatcgcccactgctgcctgccacctctgcctttgctgggagggcagcgtgagctgcgagcccaaggcatgtgcccctgcactgtgccccttccctgccaggggcgactgctgccctgactgtgatggtgagggtcatgggatagggagctgccggggtgggatgcgggagaccagagggctgggtcagaataatctttactgccctagggtggatctaaaatatttattacag

SEQ ID NO: 549 - protein, 260 aa, Homo sapiens
MDRHSSYIFIWLQLELCAMAVLLTKGEIRCYCDAAHCVATGYMCKSELSACFSRLLDPQNSNSPLTHGCLDSLASTTDICQAKQARNHSGTTIPTLECCHEDMCNYRGLHDVLSPPRGEASGQGNRYQHDGSRNLITKVQELTSSKELWFRAAVIAVPIAGGLILVLLIMLALRMLRSENKRLQDQRQQMLSRLHYSFHGHHSKKGQVAKLDLECMVPVSGHENCCLTCDKMRQADLSNDKILSLVHWGMYSGHGKLEFV

SEQ ID NO: 550 - protein, 132 aa, Homo sapiens
VLLTKGEIRCYCDAAHCVATGYMCKSELSACFSRLLDPQNSNSPLTHGCLDSLASTTDICQAKQARNHSGTTIPTLECCHEDMCNYRGLHDVLSPPRGEASGQGNRYQHDGSRNLITKVQELTSSKELWFRA

SEQ ID NO: 551 - DNA, 780 bp, Homo sapiens
atggatcgccactccagctacatcttcatctggctgcagctggagctctgcgccatggccgtgctgctcaccaaaggtgaaattcgatgctactgtgatgctgcccactgtgtagccactggttatatgtgtaaatctgagctcagcgcctgcttctctagacttcttgatcctcagaactcaaattccccactcacccatggctgcctggactctcttgcaagcacgacagacatctgccaagccaaacaggcccgaaaccactctggcaccaccatacccacattggaatgctgtcatgaagacatgtgcaattacagagggctgcacgatgttctctctcctcccaggggtgaggcctcaggacaaggaaacaggtatcagcatgatggtagcagaaaccttatcaccaaggtgcaggagctgacttcttccaaagagttgtggttccgggcagcggtcattgccgtgcccattgctggagggctgattttagtgttgcttattatgttggccctgaggatgcttcgaagtgaaaataagaggctgcaggatcagcggcaacagatgctctcccgtttgcactacagctttcacggacaccattccaaaaaggggcaggttgcaaagttagacttggaatgcatggtgccggtcagtgggcacgagaactgctgtctgacctgtgataaaatgagacaagcagacctcagcaacgataagatcctctcgcttgttcactggggcatgtacagtgggcacgggaagctggaattcgta

SEQ ID NO: 552 - DNA, 396 bp, Homo sapiens
gtgctgctcaccaaaggtgaaattcgatgctactgtgatgctgcccactgtgtagccactggttatatgtgtaaatctgagctcagcgcctgcttctctagacttcttgatcctcagaactcaaattccccactcacccatggctgcctggactctcttgcaagcacgacagacatctgccaagccaaacaggcccgaaaccactctggcaccaccatacccacattggaatgctgtcatgaagacatgtgcaattacagagggctgcacgatgttctctctcctcccaggggtgaggcctcaggacaaggaaacaggtatcagcatgatggtagcagaaaccttatcaccaaggtgcaggagctgacttcttccaaagagttgtggttccgggca

SEQ ID NO: 553 - protein, 685 aa, Homo sapiens
MLWFSGVGALAERYCRRSPGITCCVLLLLNCSGVPMSLASSFLTGSVAKCENEGEVLQIPFITDNPCIMCVCLNKEVTCKREKCPVLSRDCALAIKQRGACCEQCKGCTYEGNTYNSSFKWQSPAEPCVLRQCQEGVVTESGVRCVVHCKNPLEHLGMCCPTCPGCVFEGVQYQEGEEFQPEGSKCTKCSCTGGRTQCVREVCPILSCPQHLSHIPPGQCCPKCLGQRKVFDLPFGSCLFRSDVYDNGSSFLYDNCTACTCRDSTVVCKRKCSHPGGCDQGQEGCCEECLLRVPPEDIKVCKFGNKIFQDGEMWSSINCTICACVKGRTECRNKQCIPISSCPQGKILNRKGCCPICTEKPGVCTVFGDPHYNTFDGRTFNFQGTCQYVLTKDCSSPASPFQVLVKNDARRTRSFSWTKSVELVLGESRVSLQQHLTVRWNGSRIALPCRAPHFHIDLDGYLLKVTTKAGLEISWDGDSFVEVMAAPHLKGKLCGLCGNYNGHKRDDLIGGDGNFKFDVDDFAESWRVESNEFCNRPQRKPVPELCQGTVKVKLRAHRECQKLKSWEFQTCHSTVDYATFYRSCVTDMCECPVHKNCYCESFLAYTRACQREGIKVHWEPQQNCAATQCKHGAVYDTCGPGCIKTCDNWNEIGPCNKPCVAGCHCPANLVLHKGRCIKPVLCPQR

SEQ ID NO: 554 - protein, 646 aa, Homo sapiens
SSFLTGSVAKCENEGEVLQIPFITDNPCIMCVCLNKEVTCKREKCPVLSRDCALAIKQRGACCEQCKGCTYEGNTYNSSFKWQSPAEPCVLRQCQEGVVTESGVRCVVHCKNPLEHLGMCCPTCPGCVFEGVQYQEGEEFQPEGSKCTKCSCTGGRTQCVREVCPILSCPQHLSHIPPGQCCPKCLGQRKVFDLPFGSCLFRSDVYDNGSSFLYDNCTACTCRDSTVVCKRKCSHPGGCDQGQEGCCEECLLRVPPEDIKVCKFGNKIFQDGEMWSSINCTICACVKGRTECRNKQCIPISSCPQGKILNRKGCCPICTEKPGVCTVFGDPHYNTFDGRTFNFQGTCQYVLTKDCSSPASPFQVLVKNDARRTRSFSWTKSVELVLGESRVSLQQHLTVRWNGSRIALPCRAPHFHIDLDGYLLKVTTKAGLEISWDGDSFVEVMAAPHLKGKLCGLCGNYNGHKRDDLIGGDGNFKFDVDDFAESWRVESNEFCNRPQRKPVPELCQGTVKVKLRAHRECQKLKSWEFQTCHSTVDYATFYRSCVTDMCECPVHKNCYCESFLAYTRACQREGIKVHWEPQQNCAATQCKHGAVYDTCGPGCIKTCDNWNEIGPCNKPCVAGCHCPANLVLHKGRCIKPVLCPQR

SEQ ID NO: 555 - DNA, 2055 bp, Homo sapiens
atgctctggttctccggcgtcggggctctggctgagcgttactgccgccgctcgcctgggattacgtgctgcgtcttgctgctactcaattgctcgggggtccccatgtctctggcttcctccttcttgacaggttctgttgcaaaatgtgaaaatgaaggtgaagtcctccagattccatttatcacagacaacccttgcataatgtgtgtctgcttgaacaaggaagtgacatgtaagagagagaagtgccccgtgctgtcccgagactgtgccctggccatcaagcagaggggagcctgttgtgaacagtgcaaaggttgcacctatgaaggaaatacctataacagctccttcaaatggcagagcccggctgagccttgtgttctacgccagtgccaggagggcgttgtcacagagtctggggtgcgctgtgttgttcattgtaaaaaccctttggagcatctgggaatgtgctgccccacatgtccaggctgtgtgtttgagggtgtgcagtatcaagaaggggaggaatttcagccagaaggaagcaaatgtaccaagtgttcctgcactggaggcaggacacaatgtgtgagagaagtctgtcccattctctcctgtccccagcaccttagtcacatacccccaggacagtgctgccccaaatgtttgggtcagaggaaagtgtttgacctcccttttgggagctgcctctttcgaagtgatgtttatgacaatggatcctcatttctgtacgataactgcacagcttgtacctgcagggactctactgtggtttgcaagaggaagtgctcccaccctggtggctgtgaccaaggccaggagggctgttgtgaagagtgcctcctacgagtgcccccagaagacatcaaagtatgcaaatttggcaacaagattttccaggatggagagatgtggtcctctatcaattgtaccatctgtgcttgtgtgaaaggcaggacggagtgtcgcaataagcagtgcattcccatcagtagctgcccacagggcaaaattctcaacagaaaaggatgctgtcctatttgcactgaaaagcccggcgtttgcacggtgtttggagatccccactacaacacttttgacggtcggacatttaactttcaggggacgtgtcagtacgttttgacaaaagactgctcctcccctgcctcgcccttccaggtgctggtgaagaacgacgcccgccggacacgctccttctcgtggaccaagtcggtggagctggtgctgggcgagagcagggtcagcctgcagcagcacctcaccgtgcgctggaacggctcgcgcatcgcgctcccctgccgcgcgccacacttccacatcgacctggatggctacctcttgaaagtgaccaccaaagcaggtttggaaatatcttgggatggagacagttttgtagaagtcatggctgcgccgcatctcaagggcaagctctgtggtctttgtggcaactacaatggacataaacgtgatgacttaattggtggagatggaaacttcaagtttgatgtggatgactttgctgaatcttggagggtggagtccaatgagttctgcaacagacctcagagaaagccagtgcctgaactgtgtcaagggacagtcaaggtaaagctccgggcccatcgagaatgccaaaagctcaaatcctgggagtttcagacctgccactcgactgtggactacgccactttctaccggtcctgtgtgacagacatgtgtgaatgtccagtccataaaaactgttattgcgagtcatttttggcatatacccgggcctgccagagagagggcatcaaagtccactgggagcctcagcagaattgtgcagccacccagtgtaagcatggtgctgtgtacgatacctgtggtccgggatgtatcaagacgtgtgacaactggaatgaaattggtccatgcaacaagccgtgcgttgctgggtgccactgtccagcaaacttggtccttcacaagggaaggtgcatcaagccagtcctttgtccccagcgg

SEQ ID NO: 556 - DNA, 1938 bp, Homo sapiens
tcctccttcttgacaggttctgttgcaaaatgtgaaaatgaaggtgaagtcctccagattccatttatcacagacaacccttgcataatgtgtgtctgcttgaacaaggaagtgacatgtaagagagagaagtgccccgtgctgtcccgagactgtgccctggccatcaagcagaggggagcctgttgtgaacagtgcaaaggttgcacctatgaaggaaatacctataacagctccttcaaatggcagagcccggctgagccttgtgttctacgccagtgccaggagggcgttgtcacagagtctggggtgcgctgtgttgttcattgtaaaaaccctttggagcatctgggaatgtgctgccccacatgtccaggctgtgtgtttgagggtgtgcagtatcaagaaggggaggaatttcagccagaaggaagcaaatgtaccaagtgttcctgcactggaggcaggacacaatgtgtgagagaagtctgtcccattctctcctgtccccagcaccttagtcacatacccccaggacagtgctgccccaaatgtttgggtcagaggaaagtgtttgacctcccttttgggagctgcctctttcgaagtgatgtttatgacaatggatcctcatttctgtacgataactgcacagcttgtacctgcagggactctactgtggtttgcaagaggaagtgctcccaccctggtggctgtgaccaaggccaggagggctgttgtgaagagtgcctcctacgagtgcccccagaagacatcaaagtatgcaaatttggcaacaagattttccaggatggagagatgtggtcctctatcaattgtaccatctgtgcttgtgtgaaaggcaggacggagtgtcgcaataagcagtgcattcccatcagtagctgcccacagggcaaaattctcaacagaaaaggatgctgtcctatttgcactgaaaagcccggcgtttgcacggtgtttggagatccccactacaacacttttgacggtcggacatttaactttcaggggacgtgtcagtacgttttgacaaaagactgctcctcccctgcctcgcccttccaggtgctggtgaagaacgacgcccgccggacacgctccttctcgtggaccaagtcggtggagctggtgctgggcgagagcagggtcagcctgcagcagcacctcaccgtgcgctggaacggctcgcgcatcgcgctcccctgccgcgcgccacacttccacatcgacctggatggctacctcttgaaagtgaccaccaaagcaggtttggaaatatcttgggatggagacagttttgtagaagtcatggctgcgccgcatctcaagggcaagctctgtggtctttgtggcaactacaatggacataaacgtgatgacttaattggtggagatggaaacttcaagtttgatgtggatgactttgctgaatcttggagggtggagtccaatgagttctgcaacagacctcagagaaagccagtgcctgaactgtgtcaagggacagtcaaggtaaagctccgggcccatcgagaatgccaaaagctcaaatcctgggagtttcagacctgccactcgactgtggactacgccactttctaccggtcctgtgtgacagacatgtgtgaatgtccagtccataaaaactgttattgcgagtcatttttggcatatacccgggcctgccagagagagggcatcaaagtccactgggagcctcagcagaattgtgcagccacccagtgtaagcatggtgctgtgtacgatacctgtggtccgggatgtatcaagacgtgtgacaactggaatgaaattggtccatgcaacaagccgtgcgttgctgggtgccactgtccagcaaacttggtccttcacaagggaaggtgcatcaagccagtcctttgtccccagcgg

SEQ ID NO: 557 - protein, 478 aa, Homo sapiens
MIRKKRKRSAPPGPCRSHGPRPATAPAPPPSPEPTRPAWTGMGLRAAPSSAAAAAAEVEQRRSPGLCPPPLELLLLLLFSLGLLHAGDCQQPAQCRIQKCTTDFVSLTSHLNSAVDGFDSEFCKALRAYAGCTQRTSKACRGNLVYHSAVLGISDLMSQRNCSKDGPTSSTNPEVTHDPCNYHSHAGAREHRRGDQNPPSYLFCGLFGDPHLRTFKDNFQTCKVEGAWPLIDNNYLSVQVTNVPVVPGSSATATNKITIIFKAHHECTDQKVYQAVTDDLPAAFVDGTTSGGDSDAKSLRIVERESGHYVEMHARYIGTTVFVRQVGRYLTLAIRMPEDLAMSYEESQDLQLCVNGCPLSERIDDGQGQVSAILGHSLPRTSLVQAWPGYTLETANTQCHEKMPVKDIYFQSCVFDLLTTGDANFTAAAHSALEDVEALHPRKERWHIFPSSGNGTPRGGSDLSVSLGLTCLILIVFL

SEQ ID NO: 558 - protein, 366 aa, Homo sapiens
GDCQQPAQCRIQKCTTDFVSLTSHLNSAVDGFDSEFCKALRAYAGCTQRTSKACRGNLVYHSAVLGISDLMSQRNCSKDGPTSSTNPEVTHDPCNYHSHAGAREHRRGDQNPPSYLFCGLFGDPHLRTFKDNFQTCKVEGAWPLIDNNYLSVQVTNVPVVPGSSATATNKITIIFKAHHECTDQKVYQAVTDDLPAAFVDGTTSGGDSDAKSLRIVERESGHYVEMHARYIGTTVFVRQVGRYLTLAIRMPEDLAMSYEESQDLQLCVNGCPLSERIDDGQGQVSAILGHSLPRTSLVQAWPGYTLETANTQCHEKMPVKDIYFQSCVFDLLTTGDANFTAAAHSALEDVEALHPRKERWHIFPSS

SEQ ID NO: 559 - DNA, 1434 bp, Homo sapiens
atgataaggaagaagaggaagcgaagcgcgccccccggcccatgccgcagccacgggcccagacccgccacggcgcccgcgccgccgccctcgccggagcccacgagacctgcatggacgggcatgggcttgagagcagcaccttccagcgccgccgctgccgccgccgaggttgagcagcgccgcagccccgggctctgccccccgccgctggagctgctgctgctgctgctgttcagcctcgggctgctccacgcaggtgactgccaacagccagcccaatgtcgaatccagaaatgcaccacggacttcgtgtccctgacttctcacctgaactctgccgttgacggctttgactctgagttttgcaaggccttgcgtgcctatgctggctgcacccagcgaacttcaaaagcctgccgtggcaacctggtataccattctgccgtgttgggtatcagtgacctcatgagccagaggaattgttccaaggatggacccacatcctctaccaaccccgaagtgacccatgatccttgcaactatcacagccacgctggagccagggaacacaggagaggggaccagaaccctcccagttaccttttttgtggcttgtttggagatcctcacctcagaactttcaaggataacttccaaacatgcaaagtagaaggggcctggccactcatagataataattatctttcagttcaagtgacaaacgtacctgtggtccctggatccagtgctactgctacaaataagatcactattatcttcaaagcccaccatgagtgtacagatcagaaagtctaccaagctgtgacagatgacctgccggccgcctttgtggatggcaccaccagtggtggggacagcgatgccaagagcctgcgtatcgtggaaagggagagtggccactatgtggagatgcacgcccgctatatagggaccacagtgtttgtgcggcaggtgggtcgctacctgacccttgccatccgtatgcctgaagacctggccatgtcctacgaggagagccaggacctgcagctgtgcgtgaacggctgccccctgagtgaacgcatcgatgacgggcagggccaggtgtctgccatcctgggacacagcctgcctcgcacctccttggtgcaggcctggcctggctacacactggagactgccaacactcaatgccatgagaagatgccagtgaaggacatctatttccagtcctgtgtcttcgacctgctcaccactggtgatgccaactttactgccgcagcccacagtgccttggaggatgtggaggccctgcacccaaggaaggaacgctggcacattttccccagcagtggcaatgggactccccgtggaggcagtgatttgtctgtcagtctaggactcacctgcttgatccttatcgtgtttttg

SEQ ID NO: 560 - DNA, 1098 bp, Homo sapiens
ggtgactgccaacagccagcccaatgtcgaatccagaaatgcaccacggacttcgtgtccctgacttctcacctgaactctgccgttgacggctttgactctgagttttgcaaggccttgcgtgcctatgctggctgcacccagcgaacttcaaaagcctgccgtggcaacctggtataccattctgccgtgttgggtatcagtgacctcatgagccagaggaattgttccaaggatggacccacatcctctaccaaccccgaagtgacccatgatccttgcaactatcacagccacgctggagccagggaacacaggagaggggaccagaaccctcccagttaccttttttgtggcttgtttggagatcctcacctcagaactttcaaggataacttccaaacatgcaaagtagaaggggcctggccactcatagataataattatctttcagttcaagtgacaaacgtacctgtggtccctggatccagtgctactgctacaaataagatcactattatcttcaaagcccaccatgagtgtacagatcagaaagtctaccaagctgtgacagatgacctgccggccgcctttgtggatggcaccaccagtggtggggacagcgatgccaagagcctgcgtatcgtggaaagggagagtggccactatgtggagatgcacgcccgctatatagggaccacagtgtttgtgcggcaggtgggtcgctacctgacccttgccatccgtatgcctgaagacctggccatgtcctacgaggagagccaggacctgcagctgtgcgtgaacggctgccccctgagtgaacgcatcgatgacgggcagggccaggtgtctgccatcctgggacacagcctgcctcgcacctccttggtgcaggcctggcctggctacacactggagactgccaacactcaatgccatgagaagatgccagtgaaggacatctatttccagtcctgtgtcttcgacctgctcaccactggtgatgccaactttactgccgcagcccacagtgccttggaggatgtggaggccctgcacccaaggaaggaacgctggcacattttccccagcagt

SEQ ID NO: 561 - protein, 458 aa, Homo sapiens
MGGLGPRRAGTSRERLVVTGRAGWMGMGRGAGRSALGFWPTLAFLLCSFPAATSPCKILKCNSEFWSATSGSHAPASDDTPEFCAALRSYALCTRRTARTCRGDLAYHSAVHGIEDLMSQHNCSKDGPTSQPRLRTLPPAGDSQERSDSPEICHYEKSFHKHSATPNYTHCGLFGDPHLRTFTDRFQTCKVQGAWPLIDNNYLNVQVTNTPVLPGSAATATSKLTIIFKNFQECVDQKVYQAEMDELPAAFVDGSKNGGDKHGANSLKITEKVSGQHVEIQAKYIGTTIVVRQVGRYLTFAVRMPEEVVNAVEDWDSQGLYLCLRGCPLNQQIDFQAFHTNAEGTGARRLAAASPAPTAPETFPYETAVAKCKEKLPVEDLYYQACVFDLLTTGDVNFTLAAYYALEDVKMLHSNKDKLHLYERTRDLPGRAAAGLPLAPRPLLGALVPLLALLPVFC

SEQ ID NO: 562 - protein, 359 aa, Homo sapiens
CKILKCNSEFWSATSGSHAPASDDTPEFCAALRSYALCTRRTARTCRGDLAYHSAVHGIEDLMSQHNCSKDGPTSQPRLRTLPPAGDSQERSDSPEICHYEKSFHKHSATPNYTHCGLFGDPHLRTFTDRFQTCKVQGAWPLIDNNYLNVQVTNTPVLPGSAATATSKLTIIFKNFQECVDQKVYQAEMDELPAAFVDGSKNGGDKHGANSLKITEKVSGQHVEIQAKYIGTTIVVRQVGRYLTFAVRMPEEVVNAVEDWDSQGLYLCLRGCPLNQQIDFQAFHTNAEGTGARRLAAASPAPTAPETFPYETAVAKCKEKLPVEDLYYQACVFDLLTTGDVNFTLAAYYALEDVKMLHS

SEQ ID NO: 563 - DNA, 1374 bp, Homo sapiens
atgggtggcctggggccacgacgggcgggaacctcgagggagaggctagtggtaacaggccgagctggatggatgggtatggggagaggggcaggacgttcagccctgggattctggccgaccctcgccttccttctctgcagcttccccgcagccacctccccgtgcaagatcctcaagtgcaactctgagttctggagcgccacgtcgggcagccacgccccagcctcagacgacacccccgagttctgtgcagccttgcgcagctacgccctgtgcacgcggcggacggcccgcacctgccggggtgacctggcctaccactcggccgtccatggcatagaggacctcatgagccagcacaactgctccaaggatggccccacctcgcagccacgcctgcgcacgctcccaccggccggagacagccaggagcgctcggacagccccgagatctgccattacgagaagagctttcacaagcactcggccacccccaactacacgcactgtggcctcttcggggacccacacctcaggactttcaccgaccgcttccagacctgcaaggtgcagggcgcctggccgctcatcgacaataattacctgaacgtgcaggtcaccaacacgcctgtgctgcccggctcagcggccactgccaccagcaagctcaccatcatcttcaagaacttccaggagtgtgtggaccagaaggtgtaccaggctgagatggacgagctcccggccgccttcgtggatggctctaagaacggtggggacaagcacggggccaacagcctgaagatcactgagaaggtgtcaggccagcacgtggagatccaggccaagtacatcggcaccaccatcgtggtgcgccaggtgggccgctacctgacctttgccgtccgcatgccagaggaagtggtcaatgctgtggaggactgggacagccagggtctctacctctgcctgcggggctgccccctcaaccagcagatcgacttccaggccttccacaccaatgctgagggcaccggtgcccgcaggctggcagccgccagccctgcacccacagcccccgagaccttcccatacgagacagccgtggccaagtgcaaggagaagctgccggtggaggacctgtactaccaggcctgcgtcttcgacctcctcaccacgggcgacgtgaacttcacactggccgcctactacgcgttggaggatgtcaagatgctccactccaacaaagacaaactgcacctgtatgagaggactcgggacctgccaggcagggcggctgcggggctgcccctggccccccggcccctcctgggcgccctcgtcccgctcctggccctgctccctgtgttctgc

SEQ ID NO: 564 - DNA, 1077 bp, Homo sapiens
tgcaagatcctcaagtgcaactctgagttctggagcgccacgtcgggcagccacgccccagcctcagacgacacccccgagttctgtgcagccttgcgcagctacgccctgtgcacgcggcggacggcccgcacctgccggggtgacctggcctaccactcggccgtccatggcatagaggacctcatgagccagcacaactgctccaaggatggccccacctcgcagccacgcctgcgcacgctcccaccggccggagacagccaggagcgctcggacagccccgagatctgccattacgagaagagctttcacaagcactcggccacccccaactacacgcactgtggcctcttcggggacccacacctcaggactttcaccgaccgcttccagacctgcaaggtgcagggcgcctggccgctcatcgacaataattacctgaacgtgcaggtcaccaacacgcctgtgctgcccggctcagcggccactgccaccagcaagctcaccatcatcttcaagaacttccaggagtgtgtggaccagaaggtgtaccaggctgagatggacgagctcccggccgccttcgtggatggctctaagaacggtggggacaagcacggggccaacagcctgaagatcactgagaaggtgtcaggccagcacgtggagatccaggccaagtacatcggcaccaccatcgtggtgcgccaggtgggccgctacctgacctttgccgtccgcatgccagaggaagtggtcaatgctgtggaggactgggacagccagggtctctacctctgcctgcggggctgccccctcaaccagcagatcgacttccaggccttccacaccaatgctgagggcaccggtgcccgcaggctggcagccgccagccctgcacccacagcccccgagaccttcccatacgagacagccgtggccaagtgcaaggagaagctgccggtggaggacctgtactaccaggcctgcgtcttcgacctcctcaccacgggcgacgtgaacttcacactggccgcctactacgcgttggaggatgtcaagatgctccactcc

SEQ ID NO: 565 - protein, 434 aa, Homo sapiens
MGMGRGAGRSALGFWPTLAFLLCSFPAATSPCKILKCNSEFWSATSGSHAPASDDTPEFCAALRSYALCTRRTARTCRGDLAYHSAVHGIEDLMSQHNCSKDGPTSQPRLRTLPPAGDSQERSDSPEICHYEKSFHKHSATPNYTHCGLFGDPHLRTFTDRFQTCKVQGAWPLIDNNYLNVQVTNTPVLPGSAATATSKLTIIFKNFQECVDQKVYQAEMDELPAAFVDGSKNGGDKHGANSLKITEKVSGQHVEIQAKYIGTTIVVRQVGRYLTFAVRMPEEVVNAVEDWDSQGLYLCLRGCPLNQQIDFQAFHTNAEGTGARRLAAASPAPTAPETFPYETAVAKCKEKLPVEDLYYQACVFDLLTTGDVNFTLAAYYALEDVKMLHSNKDKLHLYERTRDLPGRAAAGLPLAPRPLLGALVPLLALLPVFC

SEQ ID NO: 566 - protein, 359 aa, Homo sapiens; identical to SEQ ID NO: 562

SEQ ID NO: 567 - DNA, 1302 bp, Homo sapiens
atgggtatggggagaggggcaggacgttcagccctgggattctggccgaccctcgccttccttctctgcagcttccccgcagccacctccccgtgcaagatcctcaagtgcaactctgagttctggagcgccacgtcgggcagccacgccccagcctcagacgacacccccgagttctgtgcagccttgcgcagctacgccctgtgcacgcggcggacggcccgcacctgccggggtgacctggcctaccactcggccgtccatggcatagaggacctcatgagccagcacaactgctccaaggatggccccacctcgcagccacgcctgcgcacgctcccaccggccggagacagccaggagcgctcggacagccccgagatctgccattacgagaagagctttcacaagcactcggccacccccaactacacgcactgtggcctcttcggggacccacacctcaggactttcaccgaccgcttccagacctgcaaggtgcagggcgcctggccgctcatcgacaataattacctgaacgtgcaggtcaccaacacgcctgtgctgcccggctcagcggccactgccaccagcaagctcaccatcatcttcaagaacttccaggagtgtgtggaccagaaggtgtaccaggctgagatggacgagctcccggccgccttcgtggatggctctaagaacggtggggacaagcacggggccaacagcctgaagatcactgagaaggtgtcaggccagcacgtggagatccaggccaagtacatcggcaccaccatcgtggtgcgccaggtgggccgctacctgacctttgccgtccgcatgccagaggaagtggtcaatgctgtggaggactgggacagccagggtctctacctctgcctgcggggctgccccctcaaccagcagatcgacttccaggccttccacaccaatgctgagggcaccggtgcccgcaggctggcagccgccagccctgcacccacagcccccgagaccttcccatacgagacagccgtggccaagtgcaaggagaagctgccggtggaggacctgtactaccaggcctgcgtcttcgacctcctcaccacgggcgacgtgaacttcacactggccgcctactacgcgttggaggatgtcaagatgctccactccaacaaagacaaactgcacctgtatgagaggactcgggacctgccaggcagggcggctgcggggctgcccctggccccccggcccctcctgggcgccctcgtcccgctcctggccctgctccctgtgttctgc

SEQ ID NO: 568 - DNA, 1077 bp, Homo sapiens; identical to SEQ ID NO: 564

SEQ ID NO: 569 - protein, 450 aa, Homo sapiens
MQPPRERLVVTGRAGWMGMGRGAGRSALGFWPTLAFLLCSFPAATSPCKILKCNSEFWSATSGSHAPASDDTPEFCAALRSYALCTRRTARTCRGDLAYHSAVHGIEDLMSQHNCSKDGPTSQPRLRTLPPAGDSQERSDSPEICHYEKSFHKHSATPNYTHCGLFGDPHLRTFTDRFQTCKVQGAWPLIDNNYLNVQVTNTPVLPGSAATATSKLTIIFKNFQECVDQKVYQAEMDELPAAFVDGSKNGGDKHGANSLKITEKVSGQHVEIQAKYIGTTIVVRQVGRYLTFAVRMPEEVVNAVEDWDSQGLYLCLRGCPLNQQIDFQAFHTNAEGTGARRLAAASPAPTAPETFPYETAVAKCKEKLPVEDLYYQACVFDLLTTGDVNFTLAAYYALEDVKMLHSNKDKLHLYERTRDLPGRAAAGLPLAPRPLLGALVPLLALLPVFC

SEQ ID NO: 570 - protein, 359 aa, Homo sapiens; identical to SEQ ID NO: 562

SEQ ID NO: 571 - DNA, 1350 bp, Homo sapiens
atgcagccgccaagggagaggctagtggtaacaggccgagctggatggatgggtatggggagaggggcaggacgttcagccctgggattctggccgaccctcgccttccttctctgcagcttccccgcagccacctccccgtgcaagatcctcaagtgcaactctgagttctggagcgccacgtcgggcagccacgccccagcctcagacgacacccccgagttctgtgcagccttgcgcagctacgccctgtgcacgcggcggacggcccgcacctgccggggtgacctggcctaccactcggccgtccatggcatagaggacctcatgagccagcacaactgctccaaggatggccccacctcgcagccacgcctgcgcacgctcccaccggccggagacagccaggagcgctcggacagccccgagatctgccattacgagaagagctttcacaagcactcggccacccccaactacacgcactgtggcctcttcggggacccacacctcaggactttcaccgaccgcttccagacctgcaaggtgcagggcgcctggccgctcatcgacaataattacctgaacgtgcaggtcaccaacacgcctgtgctgcccggctcagcggccactgccaccagcaagctcaccatcatcttcaagaacttccaggagtgtgtggaccagaaggtgtaccaggctgagatggacgagctcccggccgccttcgtggatggctctaagaacggtggggacaagcacggggccaacagcctgaagatcactgagaaggtgtcaggccagcacgtggagatccaggccaagtacatcggcaccaccatcgtggtgcgccaggtgggccgctacctgacctttgccgtccgcatgccagaggaagtggtcaatgctgtggaggactgggacagccagggtctctacctctgcctgcggggctgccccctcaaccagcagatcgacttccaggccttccacaccaatgctgagggcaccggtgcccgcaggctggcagccgccagccctgcacccacagcccccgagaccttcccatacgagacagccgtggccaagtgcaaggagaagctgccggtggaggacctgtactaccaggcctgcgtcttcgacctcctcaccacgggcgacgtgaacttcacactggccgcctactacgcgttggaggatgtcaagatgctccactccaacaaagacaaactgcacctgtatgagaggactcgggacctgccaggcagggcggctgcggggctgcccctggccccccggcccctcctgggcgccctcgtcccgctcctggccctgctccctgtgttctgc

SEQ ID NO: 572 - DNA, 1077 bp, Homo sapiens; identical to SEQ ID NO: 564

SEQ ID NO: 573 - protein, 426 aa, Homo sapiens
MGEPGQSPSPRSSHGSPPTLSTLTLLLLLCGHAHSQCKILRCNAEYVSSTLSLRGGGSSGALRGGGGGGRGGGVGSGGLCRALRSYALCTRRTARTCRGDLAFHSAVHGIEDLMIQHNCSRQGPTAPPPPRGPALPGAGSGLPAPDPCDYEGRFSRLHGRPPGFLHCASFGDPHVRSFHHHFHTCRVQGAWPLLDNDFLFVQATSSPMALGANATATRKLTIIFKNMQECIDQKVYQAEVDNLPVAFEDGSINGGDRPGGSSLSIQTANPGNHVEIQAAYIGTTIIIRQTAGQLSFSIKVAEDVAMAFSAEQDLQLCVGGCPPSQRLSRSERNRRGAITIDTARRLCKEGLPVEDAYFHSCVFDVLISGDPNFTVAAQAALEDARAFLPDLEKLHLFPSDAGVPLSSATLLAPLLSGLFVLWLCIQ

SEQ ID NO: 574 - protein, 365 aa, Homo sapiens
QCKILRCNAEYVSSTLSLRGGGSSGALRGGGGGGRGGGVGSGGLCRALRSYALCTRRTARTCRGDLAFHSAVHGIEDLMIQHNCSRQGPTAPPPPRGPALPGAGSGLPAPDPCDYEGRFSRLHGRPPGFLHCASFGDPHVRSFHHHFHTCRVQGAWPLLDNDFLFVQATSSPMALGANATATRKLTIIFKNMQECIDQKVYQAEVDNLPVAFEDGSINGGDRPGGSSLSIQTANPGNHVEIQAAYIGTTIIIRQTAGQLSFSIKVAEDVAMAFSAEQDLQLCVGGCPPSQRLSRSERNRRGAITIDTARRLCKEGLPVEDAYFHSCVFDVLISGDPNFTVAAQAALEDARAFLPDLEKLHLFPSD

SEQ ID NO: 575 - DNA, 1278 bp, Homo sapiens
atgggggagccaggccagtcccctagtcccaggtcctcccatggcagtcccccaactctaagcactctcactctcctgctgctcctctgtggacatgctcattctcaatgcaagatcctccgctgcaatgctgagtacgtatcgtccactctgagccttagaggtgggggttcatcaggagcacttcgaggaggaggaggaggaggccggggtggaggggtgggctctggcggcctctgtcgagccctccgctcctatgcgctctgcactcggcgcaccgcccgcacctgccgcggggacctcgccttccattcggcggtacatggcatcgaagacctgatgatccagcacaactgctcccgccagggccctacagcccctcccccgccccggggccccgcccttccaggcgcgggctccggcctccctgccccggacccttgtgactatgaaggccggttttcccggctgcatggtcgtcccccggggttcttgcattgcgcttccttcggggacccccatgtgcgcagcttccaccatcactttcacacatgccgtgtccaaggagcttggcctctactggataatgacttcctctttgtccaagccaccagctcccccatggcgttgggggccaacgctaccgccacccggaagctcaccatcatatttaagaacatgcaggaatgcattgatcagaaggtgtatcaggctgaggtggataatcttcctgtagcctttgaagatggttctatcaatggaggtgaccgacctgggggatccagtttgtcgattcaaactgctaaccctgggaaccatgtggagatccaagctgcctacattggcacaactataatcattcggcagacagctgggcagctctccttctccatcaaggtagcagaggatgtggccatggccttctcagctgaacaggacctgcagctctgtgttggggggtgccctccaagtcagcgactctctcgatcagagcgcaatcgtcggggagctataaccattgatactgccagacggctgtgcaaggaagggcttccagtggaagatgcttacttccattcctgtgtctttgatgttttaatttctggtgatcccaactttaccgtggcagctcaggcagcactggaggatgcccgagccttcctgccagacttagagaagctgcatctcttcccctcagatgctggggttcctctttcctcagcaaccctcttagctccactcctttctgggctctttgttctgtggctttgcattcag

SEQ ID NO: 576 - DNA, 1095 bp, Homo sapiens
caatgcaagatcctccgctgcaatgctgagtacgtatcgtccactctgagccttagaggtgggggttcatcaggagcacttcgaggaggaggaggaggaggccggggtggaggggtgggctctggcggcctctgtcgagccctccgctcctatgcgctctgcactcggcgcaccgcccgcacctgccgcggggacctcgccttccattcggcggtacatggcatcgaagacctgatgatccagcacaactgctcccgccagggccctacagcccctcccccgccccggggccccgcccttccaggcgcgggctccggcctccctgccccggacccttgtgactatgaaggccggttttcccggctgcatggtcgtcccccggggttcttgcattgcgcttccttcggggacccccatgtgcgcagcttccaccatcactttcacacatgccgtgtccaaggagcttggcctctactggataatgacttcctctttgtccaagccaccagctcccccatggcgttgggggccaacgctaccgccacccggaagctcaccatcatatttaagaacatgcaggaatgcattgatcagaaggtgtatcaggctgaggtggataatcttcctgtagcctttgaagatggttctatcaatggaggtgaccgacctgggggatccagtttgtcgattcaaactgctaaccctgggaaccatgtggagatccaagctgcctacattggcacaactataatcattcggcagacagctgggcagctctccttctccatcaaggtagcagaggatgtggccatggccttctcagctgaacaggacctgcagctctgtgttggggggtgccctccaagtcagcgactctctcgatcagagcgcaatcgtcggggagctataaccattgatactgccagacggctgtgcaaggaagggcttccagtggaagatgcttacttccattcctgtgtctttgatgttttaatttctggtgatcccaactttaccgtggcagctcaggcagcactggaggatgcccgagccttcctgccagacttagagaagctgcatctcttcccctcagat

SEQ ID NO: 577 - protein, 313 aa, Homo sapiens
MIQHNCSRQGPTAPPPPRGPALPGAGSGLPAPDPCDYEGRFSRLHGRPPGFLHCASFGDPHVRSFHHHFHTCRVQGAWPLLDNDFLFVQATSSPMALGANATATRKLTIIFKNMQECIDQKVYQAEVDNLPVAFEDGSINGGDRPGGSSLSIQTANPGNHVEIQAAYIGTTIIIRQTAGQLSFSIKVAEDVAMAFSAEQDLQLCVGGCPPSQRLSRSERNRRGAITIDTARRLCKEGLPVEDAYFHSCVFDVLISGDPNFTVAAQAALEDARAFLPDLEKLHLFPSDAGVPLSSATLLAPLLSGLFVLWLCIQ

SEQ ID NO: 578 - protein, 287 aa, Homo sapiens
MIQHNCSRQGPTAPPPPRGPALPGAGSGLPAPDPCDYEGRFSRLHGRPPGFLHCASFGDPHVRSFHHHFHTCRVQGAWPLLDNDFLFVQATSSPMALGANATATRKLTIIFKNMQECIDQKVYQAEVDNLPVAFEDGSINGGDRPGGSSLSIQTANPGNHVEIQAAYIGTTIIIRQTAGQLSFSIKVAEDVAMAFSAEQDLQLCVGGCPPSQRLSRSERNRRGAITIDTARRLCKEGLPVEDAYFHSCVFDVLISGDPNFTVAAQAALEDARAFLPDLEKLHLFPSD

SEQ ID NO: 579 - DNA, 939 bp, Homo sapiens
atgatccagcacaactgctcccgccagggccctacagcccctcccccgccccggggccccgcccttccaggcgcgggctccggcctccctgccccggacccttgtgactatgaaggccggttttcccggctgcatggtcgtcccccggggttcttgcattgcgcttccttcggggacccccatgtgcgcagcttccaccatcactttcacacatgccgtgtccaaggagcttggcctctactggataatgacttcctctttgtccaagccaccagctcccccatggcgttgggggccaacgctaccgccacccggaagctcaccatcatatttaagaacatgcaggaatgcattgatcagaaggtgtatcaggctgaggtggataatcttcctgtagcctttgaagatggttctatcaatggaggtgaccgacctgggggatccagtttgtcgattcaaactgctaaccctgggaaccatgtggagatccaagctgcctacattggcacaactataatcattcggcagacagctgggcagctctccttctccatcaaggtagcagaggatgtggccatggccttctcagctgaacaggacctgcagctctgtgttggggggtgccctccaagtcagcgactctctcgatcagagcgcaatcgtcggggagctataaccattgatactgccagacggctgtgcaaggaagggcttccagtggaagatgcttacttccattcctgtgtctttgatgttttaatttctggtgatcccaactttaccgtggcagctcaggcagcactggaggatgcccgagccttcctgccagacttagagaagctgcatctcttcccctcagatgctggggttcctctttcctcagcaaccctcttagctccactcctttctgggctctttgttctgtggctttgcattcag

SEQ ID NO: 580 - DNA, 861 bp, Homo sapiens
atgatccagcacaactgctcccgccagggccctacagcccctcccccgccccggggccccgcccttccaggcgcgggctccggcctccctgccccggacccttgtgactatgaaggccggttttcccggctgcatggtcgtcccccggggttcttgcattgcgcttccttcggggacccccatgtgcgcagcttccaccatcactttcacacatgccgtgtccaaggagcttggcctctactggataatgacttcctctttgtccaagccaccagctcccccatggcgttgggggccaacgctaccgccacccggaagctcaccatcatatttaagaacatgcaggaatgcattgatcagaaggtgtatcaggctgaggtggataatcttcctgtagcctttgaagatggttctatcaatggaggtgaccgacctgggggatccagtttgtcgattcaaactgctaaccctgggaaccatgtggagatccaagctgcctacattggcacaactataatcattcggcagacagctgggcagctctccttctccatcaaggtagcagaggatgtggccatggccttctcagctgaacaggacctgcagctctgtgttggggggtgccctccaagtcagcgactctctcgatcagagcgcaatcgtcggggagctataaccattgatactgccagacggctgtgcaaggaagggcttccagtggaagatgcttacttccattcctgtgtctttgatgttttaatttctggtgatcccaactttaccgtggcagctcaggcagcactggaggatgcccgagccttcctgccagacttagagaagctgcatctcttcccctcagat

SEQ ID NO: 581 - protein, 174 aa, Homo sapiens
MQECIDQKVYQAEVDNLPVAFEDGSINGGDRPGGSSLSIQTANPGNHVEIQAAYIGTTIIIRQTAGQLSFSIKVAEDVAMAFSAEQDLQLCVGGCPPSQRLSRSERNRRGAITIDTARRLCKEGLPVEDAYFHSCVFDVLISGDPNFTVAAQAALEDARAFLPDLEKLHLFPSD

SEQ ID NO: 582 - protein, 174 aa, Homo sapiens; identical to SEQ ID NO: 581

SEQ ID NO: 583 - DNA, 600 bp, Homo sapiens
atgcaggaatgcattgatcagaaggtgtatcaggctgaggtggataatcttcctgtagcctttgaagatggttctatcaatggaggtgaccgacctgggggatccagtttgtcgattcaaactgctaaccctgggaaccatgtggagatccaagctgcctacattggcacaactataatcattcggcagacagctgggcagctctccttctccatcaaggtagcagaggatgtggccatggccttctcagctgaacaggacctgcagctctgtgttggggggtgccctccaagtcagcgactctctcgatcagagcgcaatcgtcggggagctataaccattgatactgccagacggctgtgcaaggaagggcttccagtggaagatgcttacttccattcctgtgtctttgatgttttaatttctggtgatcccaactttaccgtggcagctcaggcagcactggaggatgcccgagccttcctgccagacttagagaagctgcatctcttcccctcagatgctggggttcctctttcctcagcaaccctcttagctccactcctttctgggctctttgttctgtggctttgcattcag

SEQ ID NO: 584 - DNA, 522 bp, Homo sapiens
atgcaggaatgcattgatcagaaggtgtatcaggctgaggtggataatcttcctgtagcctttgaagatggttctatcaatggaggtgaccgacctgggggatccagtttgtcgattcaaactgctaaccctgggaaccatgtggagatccaagctgcctacattggcacaactataatcattcggcagacagctgggcagctctccttctccatcaaggtagcagaggatgtggccatggccttctcagctgaacaggacctgcagctctgtgttggggggtgccctccaagtcagcgactctctcgatcagagcgcaatcgtcggggagctataaccattgatactgccagacggctgtgcaaggaagggcttccagtggaagatgcttacttccattcctgtgtctttgatgttttaatttctggtgatcccaactttaccgtggcagctcaggcagcactggaggatgcccgagccttcctgccagacttagagaagctgcatctcttcccctcagat

SEQ ID NO: 585 - protein, 851 aa, Homo sapiens
MTSHYVIAIFALMSSCLATAGPEPGALCELSPVSASHPVQALMESFTVLSGCASRGTTGLPQEVHVLNLRTAGQGPGQLQREVTLHLNPISSVHIHHKSVVFLLNSPHPLVWHLKTERLATGVSRLFLVSEGSVVQFSSANFSLTAETEERNFPHGNEHLLNWARKEYGAVTSFTELKIARNIYIKVGEDQVFPPKCNIGKNFLSLNYLAEYLQPKAAEGCVMSSQPQNEEVHIIELITPNSNPYSAFQVDITIDIRPSQEDLEVVKNLILILKCKKSVNWVIKSFDVKGSLKIIAPNSIGFGKESERSMTMTKSIRDDIPSTQGNLVKWALDNGYSPITSYTMAPVANRFHLRLENNAEEMGDEEVHTIPPELRILLDPGALPALQNPPIRGGEGQNGGLPFPFPDISRRVWNEEGEDGLPRPKDPVIPSIQLFPGLREPEEVQGSVDIALSVKCDNEKMIVAVEKDSFQASGYSGMDVTLLDPTCKAKMNGTHFVLESPLNGCGTRPRWSALDGVVYYNSIVIQVPALGDSSGWPDGYEDLESGDNGFPGDMDEGDASLFTRPEIVVFNCSLQQVRNPSSFQEQPHGNITFNMELYNTDLFLVPSQGVFSVPENGHVYVEVSVTKAEQELGFAIQTCFISPYSNPDRMSHYTIIENICPKDESVKFYSPKRVHFPIPQADMDKKRFSFVFKPVFNTSLLFLQCELTLCTKMEKHPQKLPKCVPPDEACTSLDASIIWAMMQNKKTFTKPLAVIHHEAESKEKGPSMKEPNPISPPIFHGLDTLTVMGIAFAAFVIGALLTGALWYIYSHTGETAGRQQVPTSPPASENSSAAHSIGSTQSTPCSSSSTA

SEQ ID NO: 586 - protein, 767 aa, Homo sapiens
GPEPGALCELSPVSASHPVQALMESFTVLSGCASRGTTGLPQEVHVLNLRTAGQGPGQLQREVTLHLNPISSVHIHHKSVVFLLNSPHPLVWHLKTERLATGVSRLFLVSEGSVVQFSSANFSLTAETEERNFPHGNEHLLNWARKEYGAVTSFTELKIARNIYIKVGEDQVFPPKCNIGKNFLSLNYLAEYLQPKAAEGCVMSSQPQNEEVHIIELITPNSNPYSAFQVDITIDIRPSQEDLEVVKNLILILKCKKSVNWVIKSFDVKGSLKIIAPNSIGFGKESERSMTMTKSIRDDIPSTQGNLVKWALDNGYSPITSYTMAPVANRFHLRLENNAEEMGDEEVHTIPPELRILLDPGALPALQNPPIRGGEGQNGGLPFPFPDISRRVWNEEGEDGLPRPKDPVIPSIQLFPGLREPEEVQGSVDIALSVKCDNEKMIVAVEKDSFQASGYSGMDVTLLDPTCKAKMNGTHFVLESPLNGCGTRPRWSALDGVVYYNSIVIQVPALGDSSGWPDGYEDLESGDNGFPGDMDEGDASLFTRPEIVVFNCSLQQVRNPSSFQEQPHGNITFNMELYNTDLFLVPSQGVFSVPENGHVYVEVSVTKAEQELGFAIQTCFISPYSNPDRMSHYTIIENICPKDESVKFYSPKRVHFPIPQADMDKKRFSFVFKPVFNTSLLFLQCELTLCTKMEKHPQKLPKCVPPDEACTSLDASIIWAMMQNKKTFTKPLAVIHHEAESKEKGPSMKEPNPISPPIFHGLDTLTV

SEQ ID NO: 587 - DNA, 2553 bp, Homo sapiens
atgacttcccattatgtgattgccatctttgccctgatgagctcctgtttagccactgcaggtccagagcctggtgcactgtgtgaactgtcacctgtcagtgcctcccatcctgtccaggccttgatggagagcttcactgttttgtcaggctgtgccagcagaggcacaactgggctgccacaggaggtgcatgtcctgaatctccgcactgcaggccaggggcctggccagctacagagagaggtcacacttcacctgaatcccatctcctcagtccacatccaccacaagtctgttgtgttcctgctcaactccccacaccccctggtgtggcatctgaagacagagagacttgccactggggtctccagactgtttttggtgtctgagggttctgtggtccagttttcatcagcaaacttctccttgacagcagaaacagaagaaaggaacttcccccatggaaatgaacatctgttaaattgggcccgaaaagagtatggagcagttacttcattcaccgaactcaagatagcaagaaacatttatattaaagtgggggaagatcaagtgttccctccaaagtgcaacatagggaagaattttctctcactcaattaccttgctgagtaccttcaacccaaagcagcagaagggtgtgtgatgtccagccagccccagaatgaggaagtacacatcatcgagctaatcacccccaactctaacccctacagtgctttccaggtggatataacaattgatataagaccttctcaagaggatcttgaagtggtcaaaaatctcatcctgatcttgaagtgcaaaaagtctgtcaactgggtgatcaaatcttttgatgttaagggaagcctgaaaattattgctcctaacagtattggctttggaaaagagagtgaaagatctatgacaatgaccaaatcaataagagatgacattccttcaacccaagggaatctggtgaagtgggctttggacaatggctatagtccaataacttcatacacaatggctcctgtggctaatagatttcatcttcggcttgaaaataatgcagaggagatgggagatgaggaagtccacactattcctcctgagctacggatcctgctggaccctggtgccctgcctgccctgcagaacccgcccatccggggaggggaaggccaaaatggaggccttccgtttcctttcccagatatttccaggagagtctggaatgaagagggagaagatgggctccctcggccaaaggaccctgtcattcccagcatacaactgtttcctggtctcagagagccagaagaggtgcaagggagcgtggatattgccctgtctgtcaaatgtgacaatgagaagatgatcgtggctgtagaaaaagattcttttcaggccagtggctactcggggatggacgtcaccctgttggatcctacctgcaaggccaagatgaatggcacacactttgttttggagtctcctctgaatggctgcggtactcggccccggtggtcagcccttgatggtgtggtctactataactccattgtgatacaggttccagcccttggggacagtagtggttggccagatggttatgaagatctggagtcaggtgataatggatttccgggagatatggatgaaggagatgcttccctgttcacccgacctgaaatcgtggtgtttaattgcagccttcagcaggtgaggaaccccagcagcttccaggaacagccccacggaaacatcaccttcaacatggagctatacaacactgacctctttttggtgccctcccagggcgtcttctctgtgccagagaatggacacgtttatgttgaggtatctgttactaaggctgaacaagaactgggatttgccatccaaacgtgctttatctctccatattcgaaccctgataggatgtctcattacaccattattgagaatatttgtcctaaagatgaatctgtgaaattctacagtcccaagagagtgcactttcctatcccgcaagctgacatggataagaagcgattcagctttgtcttcaagcctgtcttcaacacctcactgctctttctacagtgtgagctgacgctgtgtacgaagatggagaagcacccccagaagttgcctaagtgtgtgcctcctgacgaagcctgcacctcgctggacgcctcgataatctgggccatgatgcagaataagaagacgttcactaagccccttgctgtgatccaccatgaagcagaatctaaagaaaaaggtccaagcatgaaggaaccaaatccaatttctccaccaattttccatggtctggacaccctaaccgtgatgggcattgcgtttgcagcctttgtgatcggagcactcctgacgggggccttgtggtacatctattctcacacaggggagacagcaggaaggcagcaagtccccacctccccgccagcctcggaaaacagcagtgctgcccacagcatcggcagcacgcagagcacgccttgctccagcagcagcacggcc

SEQ ID NO: 588 - DNA, 2301 bp, Homo sapiens
ggtccagagcctggtgcactgtgtgaactgtcacctgtcagtgcctcccatcctgtccaggccttgatggagagcttcactgttttgtcaggctgtgccagcagaggcacaactgggctgccacaggaggtgcatgtcctgaatctccgcactgcaggccaggggcctggccagctacagagagaggtcacacttcacctgaatcccatctcctcagtccacatccaccacaagtctgttgtgttcctgctcaactccccacaccccctggtgtggcatctgaagacagagagacttgccactggggtctccagactgtttttggtgtctgagggttctgtggtccagttttcatcagcaaacttctccttgacagcagaaacagaagaaaggaacttcccccatggaaatgaacatctgttaaattgggcccgaaaagagtatggagcagttacttcattcaccgaactcaagatagcaagaaacatttatattaaagtgggggaagatcaagtgttccctccaaagtgcaacatagggaagaattttctctcactcaattaccttgctgagtaccttcaacccaaagcagcagaagggtgtgtgatgtccagccagccccagaatgaggaagtacacatcatcgagctaatcacccccaactctaacccctacagtgctttccaggtggatataacaattgatataagaccttctcaagaggatcttgaagtggtcaaaaatctcatcctgatcttgaagtgcaaaaagtctgtcaactgggtgatcaaatcttttgatgttaagggaagcctgaaaattattgctcctaacagtattggctttggaaaagagagtgaaagatctatgacaatgaccaaatcaataagagatgacattccttcaacccaagggaatctggtgaagtgggctttggacaatggctatagtccaataacttcatacacaatggctcctgtggctaatagatttcatcttcggcttgaaaataatgcagaggagatgggagatgaggaagtccacactattcctcctgagctacggatcctgctggaccctggtgccctgcctgccctgcagaacccgcccatccggggaggggaaggccaaaatggaggccttccgtttcctttcccagatatttccaggagagtctggaatgaagagggagaagatgggctccctcggccaaaggaccctgtcattcccagcatacaactgtttcctggtctcagagagccagaagaggtgcaagggagcgtggatattgccctgtctgtcaaatgtgacaatgagaagatgatcgtggctgtagaaaaagattcttttcaggccagtggctactcggggatggacgtcaccctgttggatcctacctgcaaggccaagatgaatggcacacactttgttttggagtctcctctgaatggctgcggtactcggccccggtggtcagcccttgatggtgtggtctactataactccattgtgatacaggttccagcccttggggacagtagtggttggccagatggttatgaagatctggagtcaggtgataatggatttccgggagatatggatgaaggagatgcttccctgttcacccgacctgaaatcgtggtgtttaattgcagccttcagcaggtgaggaaccccagcagcttccaggaacagccccacggaaacatcaccttcaacatggagctatacaacactgacctctttttggtgccctcccagggcgtcttctctgtgccagagaatggacacgtttatgttgaggtatctgttactaaggctgaacaagaactgggatttgccatccaaacgtgctttatctctccatattcgaaccctgataggatgtctcattacaccattattgagaatatttgtcctaaagatgaatctgtgaaattctacagtcccaagagagtgcactttcctatcccgcaagctgacatggataagaagcgattcagctttgtcttcaagcctgtcttcaacacctcactgctctttctacagtgtgagctgacgctgtgtacgaagatggagaagcacccccagaagttgcctaagtgtgtgcctcctgacgaagcctgcacctcgctggacgcctcgataatctgggccatgatgcagaataagaagacgttcactaagccccttgctgtgatccaccatgaagcagaatctaaagaaaaaggtccaagcatgaaggaaccaaatccaatttctccaccaattttccatggtctggacaccctaaccgtg

SEQ ID NO: 589 - protein, 850 aa, Homo sapiens
MTSHYVIAIFALMSSCLATAGPEPGALCELSPVSASHPVQALMESFTVLSGCASRGTTGLPQEVHVLNLRTAGQGPGQLQREVTLHLNPISSVHIHHKSVVFLLNSPHPLVWHLKTERLATGVSRLFLVSEGSVVQFSSANFSLTAETEERNFPHGNEHLLNWARKEYGAVTSFTELKIARNIYIKVGEDQVFPPKCNIGKNFLSLNYLAEYLQPKAAEGCVMSSQPQNEEVHIIELITPNSNPYSAFQVDITIDIRPSQEDLEVVKNLILILKCKKSVNWVIKSFDVKGSLKIIAPNSIGFGKESERSMTMTKSIRDDIPSTQGNLVKWALDNGYSPITSYTMAPVANRFHLRLENNEEMGDEEVHTIPPELRILLDPGALPALQNPPIRGGEGQNGGLPFPFPDISRRVWNEEGEDGLPRPKDPVIPSIQLFPGLREPEEVQGSVDIALSVKCDNEKMIVAVEKDSFQASGYSGMDVTLLDPTCKAKMNGTHFVLESPLNGCGTRPRWSALDGVVYYNSIVIQVPALGDSSGWPDGYEDLESGDNGFPGDMDEGDASLFTRPEIVVFNCSLQQVRNPSSFQEQPHGNITFNMELYNTDLFLVPSQGVFSVPENGHVYVEVSVTKAEQELGFAIQTCFISPYSNPDRMSHYTIIENICPKDESVKFYSPKRVHFPIPQADMDKKRFSFVFKPVFNTSLLFLQCELTLCTKMEKHPQKLPKCVPPDEACTSLDASIIWAMMQNKKTFTKPLAVIHHEAESKEKGPSMKEPNPISPPIFHGLDTLTVMGIAFAAFVIGALLTGALWYIYSHTGETAGRQQVPTSPPASENSSAAHSIGSTQSTPCSSSSTA

SEQ ID NO: 590 - protein, 766 aa, Homo sapiens
GPEPGALCELSPVSASHPVQALMESFTVLSGCASRGTTGLPQEVHVLNLRTAGQGPGQLQREVTLHLNPISSVHIHHKSVVFLLNSPHPLVWHLKTERLATGVSRLFLVSEGSVVQFSSANFSLTAETEERNFPHGNEHLLNWARKEYGAVTSFTELKIARNIYIKVGEDQVFPPKCNIGKNFLSLNYLAEYLQPKAAEGCVMSSQPQNEEVHIIELITPNSNPYSAFQVDITIDIRPSQEDLEVVKNLILILKCKKSVNWVIKSFDVKGSLKIIAPNSIGFGKESERSMTMTKSIRDDIPSTQGNLVKWALDNGYSPITSYTMAPVANRFHLRLENNEEMGDEEVHTIPPELRILLDPGALPALQNPPIRGGEGQNGGLPFPFPDISRRVWNEEGEDGLPRPKDPVIPSIQLFPGLREPEEVQGSVDIALSVKCDNEKMIVAVEKDSFQASGYSGMDVTLLDPTCKAKMNGTHFVLESPLNGCGTRPRWSALDGVVYYNSIVIQVPALGDSSGWPDGYEDLESGDNGFPGDMDEGDASLFTRPEIVVFNCSLQQVRNPSSFQEQPHGNITFNMELYNTDLFLVPSQGVFSVPENGHVYVEVSVTKAEQELGFAIQTCFISPYSNPDRMSHYTIIENICPKDESVKFYSPKRVHFPIPQADMDKKRFSFVFKPVFNTSLLFLQCELTLCTKMEKHPQKLPKCVPPDEACTSLDASIIWAMMQNKKTFTKPLAVIHHEAESKEKGPSMKEPNPISPPIFHGLDTLTV

SEQ ID NO: 591 - DNA, 2550 bp, Homo sapiens
atgacttcccattatgtgattgccatctttgccctgatgagctcctgtttagccactgcaggtccagagcctggtgcactgtgtgaactgtcacctgtcagtgcctcccatcctgtccaggccttgatggagagcttcactgttttgtcaggctgtgccagcagaggcacaactgggctgccacaggaggtgcatgtcctgaatctccgcactgcaggccaggggcctggccagctacagagagaggtcacacttcacctgaatcccatctcctcagtccacatccaccacaagtctgttgtgttcctgctcaactccccacaccccctggtgtggcatctgaagacagagagacttgccactggggtctccagactgtttttggtgtctgagggttctgtggtccagttttcatcagcaaacttctccttgacagcagaaacagaagaaaggaacttcccccatggaaatgaacatctgttaaattgggcccgaaaagagtatggagcagttacttcattcaccgaactcaagatagcaagaaacatttatattaaagtgggggaagatcaagtgttccctccaaagtgcaacatagggaagaattttctctcactcaattaccttgctgagtaccttcaacccaaagcagcagaagggtgtgtgatgtccagccagccccagaatgaggaagtacacatcatcgagctaatcacccccaactctaacccctacagtgctttccaggtggatataacaattgatataagaccttctcaagaggatcttgaagtggtcaaaaatctcatcctgatcttgaagtgcaaaaagtctgtcaactgggtgatcaaatcttttgatgttaagggaagcctgaaaattattgctcctaacagtattggctttggaaaagagagtgaaagatctatgacaatgaccaaatcaataagagatgacattccttcaacccaagggaatctggtgaagtgggctttggacaatggctatagtccaataacttcatacacaatggctcctgtggctaatagatttcatcttcggcttgaaaataatgaggagatgggagatgaggaagtccacactattcctcctgagctacggatcctgctggaccctggtgccctgcctgccctgcagaacccgcccatccggggaggggaaggccaaaatggaggccttccgtttcctttcccagatatttccaggagagtctggaatgaagagggagaagatgggctccctcggccaaaggaccctgtcattcccagcatacaactgtttcctggtctcagagagccagaagaggtgcaagggagcgtggatattgccctgtctgtcaaatgtgacaatgagaagatgatcgtggctgtagaaaaagattcttttcaggccagtggctactcggggatggacgtcaccctgttggatcctacctgcaaggccaagatgaatggcacacactttgttttggagtctcctctgaatggctgcggtactcggccccggtggtcagcccttgatggtgtggtctactataactccattgtgatacaggttccagcccttggggacagtagtggttggccagatggttatgaagatctggagtcaggtgataatggatttccgggagatatggatgaaggagatgcttccctgttcacccgacctgaaatcgtggtgtttaattgcagccttcagcaggtgaggaaccccagcagcttccaggaacagccccacggaaacatcaccttcaacatggagctatacaacactgacctctttttggtgccctcccagggcgtcttctctgtgccagagaatggacacgtttatgttgaggtatctgttactaaggctgaacaagaactgggatttgccatccaaacgtgctttatctctccatattcgaaccctgataggatgtctcattacaccattattgagaatatttgtcctaaagatgaatctgtgaaattctacagtcccaagagagtgcactttcctatcccgcaagctgacatggataagaagcgattcagctttgtcttcaagcctgtcttcaacacctcactgctctttctacagtgtgagctgacgctgtgtacgaagatggagaagcacccccagaagttgcctaagtgtgtgcctcctgacgaagcctgcacctcgctggacgcctcgataatctgggccatgatgcagaataagaagacgttcactaagccccttgctgtgatccaccatgaagcagaatctaaagaaaaaggtccaagcatgaaggaaccaaatccaatttctccaccaattttccatggtctggacaccctaaccgtgatgggcattgcgtttgcagcctttgtgatcggagcactcctgacgggggccttgtggtacatctattctcacacaggggagacagcaggaaggcagcaagtccccacctccccgccagcctcggaaaacagcagtgctgcccacagcatcggcagcacgcagagcacgccttgctccagcagcagcacggcc

SEQ ID NO: 592 - DNA, 2298 bp, Homo sapiens
ggtccagagcctggtgcactgtgtgaactgtcacctgtcagtgcctcccatcctgtccaggccttgatggagagcttcactgttttgtcaggctgtgccagcagaggcacaactgggctgccacaggaggtgcatgtcctgaatctccgcactgcaggccaggggcctggccagctacagagagaggtcacacttcacctgaatcccatctcctcagtccacatccaccacaagtctgttgtgttcctgctcaactccccacaccccctggtgtggcatctgaagacagagagacttgccactggggtctccagactgtttttggtgtctgagggttctgtggtccagttttcatcagcaaacttctccttgacagcagaaacagaagaaaggaacttcccccatggaaatgaacatctgttaaattgggcccgaaaagagtatggagcagttacttcattcaccgaactcaagatagcaagaaacatttatattaaagtgggggaagatcaagtgttccctccaaagtgcaacatagggaagaattttctctcactcaattaccttgctgagtaccttcaacccaaagcagcagaagggtgtgtgatgtccagccagccccagaatgaggaagtacacatcatcgagctaatcacccccaactctaacccctacagtgctttccaggtggatataacaattgatataagaccttctcaagaggatcttgaagtggtcaaaaatctcatcctgatcttgaagtgcaaaaagtctgtcaactgggtgatcaaatcttttgatgttaagggaagcctgaaaattattgctcctaacagtattggctttggaaaagagagtgaaagatctatgacaatgaccaaatcaataagagatgacattccttcaacccaagggaatctggtgaagtgggctttggacaatggctatagtccaataacttcatacacaatggctcctgtggctaatagatttcatcttcggcttgaaaataatgaggagatgggagatgaggaagtccacactattcctcctgagctacggatcctgctggaccctggtgccctgcctgccctgcagaacccgcccatccggggaggggaaggccaaaatggaggccttccgtttcctttcccagatatttccaggagagtctggaatgaagagggagaagatgggctccctcggccaaaggaccctgtcattcccagcatacaactgtttcctggtctcagagagccagaagaggtgcaagggagcgtggatattgccctgtctgtcaaatgtgacaatgagaagatgatcgtggctgtagaaaaagattcttttcaggccagtggctactcggggatggacgtcaccctgttggatcctacctgcaaggccaagatgaatggcacacactttgttttggagtctcctctgaatggctgcggtactcggccccggtggtcagcccttgatggtgtggtctactataactccattgtgatacaggttccagcccttggggacagtagtggttggccagatggttatgaagatctggagtcaggtgataatggatttccgggagatatggatgaaggagatgcttccctgttcacccgacctgaaatcgtggtgtttaattgcagccttcagcaggtgaggaaccccagcagcttccaggaacagccccacggaaacatcaccttcaacatggagctatacaacactgacctctttttggtgccctcccagggcgtcttctctgtgccagagaatggacacgtttatgttgaggtatctgttactaaggctgaacaagaactgggatttgccatccaaacgtgctttatctctccatattcgaaccctgataggatgtctcattacaccattattgagaatatttgtcctaaagatgaatctgtgaaattctacagtcccaagagagtgcactttcctatcccgcaagctgacatggataagaagcgattcagctttgtcttcaagcctgtcttcaacacctcactgctctttctacagtgtgagctgacgctgtgtacgaagatggagaagcacccccagaagttgcctaagtgtgtgcctcctgacgaagcctgcacctcgctggacgcctcgataatctgggccatgatgcagaataagaagacgttcactaagccccttgctgtgatccaccatgaagcagaatctaaagaaaaaggtccaagcatgaaggaaccaaatccaatttctccaccaattttccatggtctggacaccctaaccgtg

SEQ ID NO: 593 - protein, 321 aa, Homo sapiens
ETVHCDLQPVGPERGEVTYTTSQVSKGCVAQAPNAILEVHVLFLEFPTGPSQLELTLQASKQNGTWPREVLLVLSVNSSVFLHLQALGIPLHLAYNSSLVTFQEPPGVNTTELPSFPKTQILEWAAERGPITSAAELNDPQSILLRLGQAQGSLSFCMLEASQDMGRTLEWRPRTPALVRGCHLEGVAGHKEAHILRVLPGHSAGPRTVTVKVELSCAPGDLDAVLILQGPPYVSWLIDANHNMQIWTTGEYSFKIFPEKNIRGFKLPDTPQGLLGEARMLNASIVASFVELPLASIVSLHASSCGGRLQTSPAPIQTTPP

SEQ ID NO: 594 - DNA, 963 bp, Homo sapiens
gaaacagtccattgtgaccttcagcctgtgggccccgagaggggcgaggtgacatataccactagccaggtctcgaagggctgcgtggctcaggcccccaatgccatccttgaagtccatgtcctcttcctggagttcccaacgggcccgtcacagctggagctgactctccaggcatccaagcaaaatggcacctggccccgagaggtgcttctggtcctcagtgtaaacagcagtgtcttcctgcatctccaggccctgggaatcccactgcacttggcctacaattccagcctggtcaccttccaagagcccccgggggtcaacaccacagagctgccatccttccccaagacccagatccttgagtgggcagctgagaggggccccatcacctctgctgctgagctgaatgacccccagagcatcctcctccgactgggccaagcccaggggtcactgtccttctgcatgctggaagccagccaggacatgggccgcacgctcgagtggcggccgcgtactccagccttggtccggggctgccacttggaaggcgtggccggccacaaggaggcgcacatcctgagggtcctgccgggccactcggccgggccccggacggtgacggtgaaggtggaactgagctgcgcacccggggatctcgatgccgtcctcatcctgcagggtcccccctacgtgtcctggctcatcgacgccaaccacaacatgcagatctggaccactggagaatactccttcaagatctttccagagaaaaacattcgtggcttcaagctcccagacacacctcaaggcctcctgggggaggcccggatgctcaatgccagcattgtggcatccttcgtggagctaccgctggccagcattgtctcacttcatgcctccagctgcggtggtaggctgcagacctcacccgcaccgatccagaccactcctccc

SEQ ID NO: 595 - protein, 869 aa, Homo sapiens
MRELVNIPLVHILTLVAFSGTEKLPKAPVITTPLETVDALVEEVATFMCAVESYPQPEISWTRNKILIKLFDTRYSIRENGQLLTILSVEDSDDGIYCCTANNGVGGAVESCGALQVKMKPKITRPPINVKIIEGLKAVLPCTTMGNPKPSVSWIKGDSPLRENSRIAVLESGSLRIHNVQKEDAGQYRCVAKNSLGTAYSKVVKLEVEVFARILRAPESHNVTFGSFVTLHCTATGIPVPTITWIENGNAVSSGSIQESVKDRVIDSRLQLFITKPGLYTCIATNKHGEKFSTAKAAATISIAEWSKPQKDNKGYCAQYRGEVCNAVLAKDALVFLNTSYADPEEAQELLVHTAWNELKVVSPVCRPAAEALLCNHIFQECSPGVVPTPIPICREYCLAVKELFCAKEWLVMEEKTHRGLYRSEMHLLSVPECSKLPSMHWDPTACARLPHLDYNKENLKTFPPMTSSKPSVDIPNLPSSSSSSFSVSPTYSMTVIISIMSSFAIFVLLTITTLYCCRRRKQWKNKKRESAAVTLTTLPSELLLDRLHPNPMYQRMPLLLNPKLLSLEYPRNNIEYVRDIGEGAFGRVFQARAPGLLPYEPFTMVAVKMLKEEASADMQADFQREAALMAEFDNPNIVKLLGVCAVGKPMCLLFEYMAYGDLNEFLRSMSPHTVCSLSHSDLSMRAQVSSPGPPPLSCAEQLCIARQVAAGMAYLSERKFVHRDLATRNCLVGENMVVKIADFGLSRNIYSADYYKANENDAIPIRWMPPESIFYNRYTTESDVWAYGVVLWEIFSYGLQPYYGMAHEEVIYYVRDGNILSCPENCPVELYNLMRLCWSKLPADRPSFTSIHRILERMCERAEGTVSV

SEQ ID NO: 596 - protein, 476 aa, Homo sapiens
GTEKLPKAPVITTPLETVDALVEEVATFMCAVESYPQPEISWTRNKILIKLFDTRYSIRENGQLLTILSVEDSDDGIYCCTANNGVGGAVESCGALQVKMKPKITRPPINVKIIEGLKAVLPCTTMGNPKPSVSWIKGDSPLRENSRIAVLESGSLRIHNVQKEDAGQYRCVAKNSLGTAYSKVVKLEVEVFARILRAPESHNVTFGSFVTLHCTATGIPVPTITWIENGNAVSSGSIQESVKDRVIDSRLQLFITKPGLYTCIATNKHGEKFSTAKAAATISIAEWSKPQKDNKGYCAQYRGEVCNAVLAKDALVFLNTSYADPEEAQELLVHTAWNELKVVSPVCRPAAEALLCNHIFQECSPGVVPTPIPICREYCLAVKELFCAKEWLVMEEKTHRGLYRSEMHLLSVPECSKLPSMHWDPTACARLPHLDYNKENLKTFPPMTSSKPSVDIPNLPSSSSSSFSVSPTYSMT

SEQ ID NO: 597 - DNA, 2607 bp, Homo sapiens
atgagagagctcgtcaacattccactggtacatattcttactctggttgccttcagcggaactgagaaacttccaaaagctcctgtcatcaccactcctcttgaaacagtggatgccttagttgaagaagtggctactttcatgtgtgcagtggaatcctacccccagcctgagatttcctggactagaaataaaattctcattaaactctttgacacccggtacagcatccgggagaatgggcagctcctcaccatcctgagtgtggaagacagtgatgatggcatttactgctgcacggccaacaatggtgtgggaggagctgtggagagttgtggagccctgcaagtgaagatgaaacctaaaataactcgtcctcccataaatgtgaaaataatagagggattaaaagcagtcctaccatgtactacaatgggtaatcccaaaccatcagtgtcttggataaagggagacagccctctcagggaaaattcccgaattgcagttcttgaatctgggagcttgaggattcataacgtacaaaaggaagatgcaggacagtatcgatgtgtggcaaaaaacagcctcgggacagcatattccaaagtggtgaagctggaagttgaggtttttgccaggatcctgcgggctcctgaatcccacaatgtcacctttggctcctttgtgaccctgcactgtacagcaacaggcattcctgtccccaccatcacctggattgaaaacggaaatgctgtttcttctgggtccattcaagagagtgtgaaagaccgagtgattgactcaagactgcagctgtttatcaccaagccaggactctacacatgcatagctaccaataagcatggggagaagttcagtactgccaaggctgcagccaccatcagcatagcagaatggagtaaaccacagaaagataacaaaggctactgcgcccagtacagaggggaggtgtgtaatgcagtcctggcaaaagatgctcttgtttttctcaacacctcctatgcggaccctgaggaggcccaagagctactggtccacacggcctggaatgaactgaaagtagtgagcccagtctgccggccagctgctgaggctttgttgtgtaaccacatcttccaggagtgcagtcctggagtagtgcctactcctattcccatttgcagagagtactgcttggcagtaaaggagctcttctgcgcaaaagaatggctggtaatggaagagaagacccacagaggactctacagatccgagatgcatttgctgtccgtgccagaatgcagcaagcttcccagcatgcattgggaccccacggcctgtgccagactgccacatctagattataacaaagaaaacctaaaaacattcccaccaatgacgtcctcaaagccaagtgtggacattccaaatctgccttcctcctcctcttcttccttctctgtctcacctacatactccatgactgtaataatctccatcatgtccagctttgcaatatttgtgcttcttaccataactactctctattgctgccgaagaagaaaacaatggaaaaataagaaaagagaatcagcagcagtaaccctcaccacactgccttctgagctcttactagatagacttcatcccaaccccatgtaccagaggatgccgctccttctgaaccccaaattgctcagcctggagtatccaaggaataacattgaatatgtgagagacatcggagagggagcgtttggaagggtgtttcaagcaagggcaccaggcttacttccctatgaacctttcactatggtggcagtaaagatgctcaaagaagaagcctcggcagatatgcaagcggactttcagagggaggcagccctcatggcagaatttgacaaccctaacattgtgaagctattaggagtgtgtgctgtcgggaagccaatgtgcctgctctttgaatacatggcctatggtgacctcaatgagttcctccgcagcatgtcccctcacaccgtgtgcagcctcagtcacagtgacttgtctatgagggctcaggtctccagccctgggcccccacccctctcctgtgctgagcagctttgcattgccaggcaggtggcagctggcatggcttacctctcagaacgtaagtttgttcaccgagatttagccaccaggaactgcctggtgggcgagaacatggtggtgaaaattgccgactttggcctctccaggaacatctactcagcagactactacaaagctaatgaaaacgacgctatccctatccgttggatgccaccagagtccattttttataaccgctacactacagagtctgatgtgtgggcctatggcgtggtcctctgggagatcttctcctatggcctgcagccctactatgggatggcccatgaggaggtcatttactacgtgcgagatggcaacatcctctcctgccctgagaactgccccgtggagctgtacaatctcatgcgtctatgttggagcaagctgcctgcagacagacccagtttcaccagtattcaccgaattctggaacgcatgtgtgagagggcagagggaactgtgagtgtc

SEQ ID NO: 598 - DNA, 1428 bp, Homo sapiens
ggaactgagaaacttccaaaagctcctgtcatcaccactcctcttgaaacagtggatgccttagttgaagaagtggctactttcatgtgtgcagtggaatcctacccccagcctgagatttcctggactagaaataaaattctcattaaactctttgacacccggtacagcatccgggagaatgggcagctcctcaccatcctgagtgtggaagacagtgatgatggcatttactgctgcacggccaacaatggtgtgggaggagctgtggagagttgtggagccctgcaagtgaagatgaaacctaaaataactcgtcctcccataaatgtgaaaataatagagggattaaaagcagtcctaccatgtactacaatgggtaatcccaaaccatcagtgtcttggataaagggagacagccctctcagggaaaattcccgaattgcagttcttgaatctgggagcttgaggattcataacgtacaaaaggaagatgcaggacagtatcgatgtgtggcaaaaaacagcctcgggacagcatattccaaagtggtgaagctggaagttgaggtttttgccaggatcctgcgggctcctgaatcccacaatgtcacctttggctcctttgtgaccctgcactgtacagcaacaggcattcctgtccccaccatcacctggattgaaaacggaaatgctgtttcttctgggtccattcaagagagtgtgaaagaccgagtgattgactcaagactgcagctgtttatcaccaagccaggactctacacatgcatagctaccaataagcatggggagaagttcagtactgccaaggctgcagccaccatcagcatagcagaatggagtaaaccacagaaagataacaaaggctactgcgcccagtacagaggggaggtgtgtaatgcagtcctggcaaaagatgctcttgtttttctcaacacctcctatgcggaccctgaggaggcccaagagctactggtccacacggcctggaatgaactgaaagtagtgagcccagtctgccggccagctgctgaggctttgttgtgtaaccacatcttccaggagtgcagtcctggagtagtgcctactcctattcccatttgcagagagtactgcttggcagtaaaggagctcttctgcgcaaaagaatggctggtaatggaagagaagacccacagaggactctacagatccgagatgcatttgctgtccgtgccagaatgcagcaagcttcccagcatgcattgggaccccacggcctgtgccagactgccacatctagattataacaaagaaaacctaaaaacattcccaccaatgacgtcctcaaagccaagtgtggacattccaaatctgccttcctcctcctcttcttccttctctgtctcacctacatactccatgact

SEQ ID NO: 599 - protein, 783 aa, Homo sapiens
MRELVNIPLVHILTLVAFSGTEKLPKAPVITTPLETVDALVEEVATFMCAVESYPQPEISWTRNKILIKLFDTRYSIRENGQLLTILSVEDSDDGIYCCTANNGVGGAVESCGALQVKMKPKITRPPINVKIIEGLKAVLPCTTMGNPKPSVSWIKGDSPLRENSRIAVLESGSLRIHNVQKEDAGQYRCVAKNSLGTAYSKVVKLEVEEESEPEQDTKVFARILRAPESHNVTFGSFVTLHCTATGIPVPTITWIENGNAVSSGSIQESVKDRVIDSRLQLFITKPGLYTCIATNKHGEKFSTAKAAATISIAEWREYCLAVKELFCAKEWLVMEEKTHRGLYRSEMHLLSVPECSKLPSMHWDPTACARLPHLAFPPMTSSKPSVDIPNLPSSSSSSFSVSPTYSMTVIISIMSSFAIFVLLTITTLYCCRRRKQWKNKKRESAAVTLTTLPSELLLDRLHPNPMYQRMPLLLNPKLLSLEYPRNNIEYVRDIGEGAFGRVFQARAPGLLPYEPFTMVAVKMLKEEASADMQADFQREAALMAEFDNPNIVKLLGVCAVGKPMCLLFEYMAYGDLNEFLRSMSPHTVCSLSHSDLSMRAQVSSPGPPPLSCAEQLCIARQVAAGMAYLSERKFVHRDLATRNCLVGENMVVKIADFGLSRNIYSADYYKANENDAIPIRWMPPESIFYNRYTTESDVWAYGVVLWEIFSYGLQPYYGMAHEEVIYYVRDGNILSCPENCPVELYNLMRLCWSKLPADRPSFTSIHRILERMCERAEGTVSV

SEQ ID NO: 600 - protein, 390 aa, Homo sapiens
GTEKLPKAPVITTPLETVDALVEEVATFMCAVESYPQPEISWTRNKILIKLFDTRYSIRENGQLLTILSVEDSDDGIYCCTANNGVGGAVESCGALQVKMKPKITRPPINVKIIEGLKAVLPCTTMGNPKPSVSWIKGDSPLRENSRIAVLESGSLRIHNVQKEDAGQYRCVAKNSLGTAYSKVVKLEVEEESEPEQDTKVFARILRAPESHNVTFGSFVTLHCTATGIPVPTITWIENGNAVSSGSIQESVKDRVIDSRLQLFITKPGLYTCIATNKHGEKFSTAKAAATISIAEWREYCLAVKELFCAKEWLVMEEKTHRGLYRSEMHLLSVPECSKLPSMHWDPTACARLPHLAFPPMTSSKPSVDIPNLPSSSSSSFSVSPTYSMT

SEQ ID NO: 601 - DNA, 2349 bp, Homo sapiens
atgagagagctcgtcaacattccactggtacatattcttactctggttgccttcagcggaactgagaaacttccaaaagctcctgtcatcaccactcctcttgaaacagtggatgccttagttgaagaagtggctactttcatgtgtgcagtggaatcctacccccagcctgagatttcctggactagaaataaaattctcattaaactctttgacacccggtacagcatccgggagaatgggcagctcctcaccatcctgagtgtggaagacagtgatgatggcatttactgctgcacggccaacaatggtgtgggaggagctgtggagagttgtggagccctgcaagtgaagatgaaacctaaaataactcgtcctcccataaatgtgaaaataatagagggattaaaagcagtcctaccatgtactacaatgggtaatcccaaaccatcagtgtcttggataaagggagacagccctctcagggaaaattcccgaattgcagttcttgaatctgggagcttgaggattcataacgtacaaaaggaagatgcaggacagtatcgatgtgtggcaaaaaacagcctcgggacagcatattccaaagtggtgaagctggaagttgaggaagaaagtgaacccgaacaagatactaaagtttttgccaggatcctgcgggctcctgaatcccacaatgtcacctttggctcctttgtgaccctgcactgtacagcaacaggcattcctgtccccaccatcacctggattgaaaacggaaatgctgtttcttctgggtccattcaagagagtgtgaaagaccgagtgattgactcaagactgcagctgtttatcaccaagccaggactctacacatgcatagctaccaataagcatggggagaagttcagtactgccaaggctgcagccaccatcagcatagcagaatggagagagtactgcttggcagtaaaggagctcttctgcgcaaaagaatggctggtaatggaagagaagacccacagaggactctacagatccgagatgcatttgctgtccgtgccagaatgcagcaagcttcccagcatgcattgggaccccacggcctgtgccagactgccacatctagcattcccaccaatgacgtcctcaaagccaagtgtggacattccaaatctgccttcctcctcctcttcttccttctctgtctcacctacatactccatgactgtaataatctccatcatgtccagctttgcaatatttgtgcttcttaccataactactctctattgctgccgaagaagaaaacaatggaaaaataagaaaagagaatcagcagcagtaaccctcaccacactgccttctgagctcttactagatagacttcatcccaaccccatgtaccagaggatgccgctccttctgaaccccaaattgctcagcctggagtatccaaggaataacattgaatatgtgagagacatcggagagggagcgtttggaagggtgtttcaagcaagggcaccaggcttacttccctatgaacctttcactatggtggcagtaaagatgctcaaagaagaagcctcggcagatatgcaagcggactttcagagggaggcagccctcatggcagaatttgacaaccctaacattgtgaagctattaggagtgtgtgctgtcgggaagccaatgtgcctgctctttgaatacatggcctatggtgacctcaatgagttcctccgcagcatgtcccctcacaccgtgtgcagcctcagtcacagtgacttgtctatgagggctcaggtctccagccctgggcccccacccctctcctgtgctgagcagctttgcattgccaggcaggtggcagctggcatggcttacctctcagaacgtaagtttgttcaccgagatttagccaccaggaactgcctggtgggcgagaacatggtggtgaaaattgccgactttggcctctccaggaacatctactcagcagactactacaaagctaatgaaaacgacgctatccctatccgttggatgccaccagagtccattttttataaccgctacactacagagtctgatgtgtgggcctatggcgtggtcctctgggagatcttctcctatggcctgcagccctactatgggatggcccatgaggaggtcatttactacgtgcgagatggcaacatcctctcctgccctgagaactgccccgtggagctgtacaatctcatgcgtctatgttggagcaagctgcctgcagacagacccagtttcaccagtattcaccgaattctggaacgcatgtgtgagagggcagagggaactgtgagtgtc

SEQ ID NO: 602 - DNA, 1170 bp, Homo sapiens
ggaactgagaaacttccaaaagctcctgtcatcaccactcctcttgaaacagtggatgccttagttgaagaagtggctactttcatgtgtgcagtggaatcctacccccagcctgagatttcctggactagaaataaaattctcattaaactctttgacacccggtacagcatccgggagaatgggcagctcctcaccatcctgagtgtggaagacagtgatgatggcatttactgctgcacggccaacaatggtgtgggaggagctgtggagagttgtggagccctgcaagtgaagatgaaacctaaaataactcgtcctcccataaatgtgaaaataatagagggattaaaagcagtcctaccatgtactacaatgggtaatcccaaaccatcagtgtcttggataaagggagacagccctctcagggaaaattcccgaattgcagttcttgaatctgggagcttgaggattcataacgtacaaaaggaagatgcaggacagtatcgatgtgtggcaaaaaacagcctcgggacagcatattccaaagtggtgaagctggaagttgaggaagaaagtgaacccgaacaagatactaaagtttttgccaggatcctgcgggctcctgaatcccacaatgtcacctttggctcctttgtgaccctgcactgtacagcaacaggcattcctgtccccaccatcacctggattgaaaacggaaatgctgtttcttctgggtccattcaagagagtgtgaaagaccgagtgattgactcaagactgcagctgtttatcaccaagccaggactctacacatgcatagctaccaataagcatggggagaagttcagtactgccaaggctgcagccaccatcagcatagcagaatggagagagtactgcttggcagtaaaggagctcttctgcgcaaaagaatggctggtaatggaagagaagacccacagaggactctacagatccgagatgcatttgctgtccgtgccagaatgcagcaagcttcccagcatgcattgggaccccacggcctgtgccagactgccacatctagcattcccaccaatgacgtcctcaaagccaagtgtggacattccaaatctgccttcctcctcctcttcttccttctctgtctcacctacatactccatgact

SEQ ID NO: 603 - protein, 773 aa, Homo sapiens
MRELVNIPLVHILTLVAFSGTEKLPKAPVITTPLETVDALVEEVATFMCAVESYPQPEISWTRNKILIKLFDTRYSIRENGQLLTILSVEDSDDGIYCCTANNGVGGAVESCGALQVKMKPKITRPPINVKIIEGLKAVLPCTTMGNPKPSVSWIKGDSPLRENSRIAVLESGSLRIHNVQKEDAGQYRCVAKNSLGTAYSKVVKLEVEVFARILRAPESHNVTFGSFVTLHCTATGIPVPTITWIENGNAVSSGSIQESVKDRVIDSRLQLFITKPGLYTCIATNKHGEKFSTAKAAATISIAEWREYCLAVKELFCAKEWLVMEEKTHRGLYRSEMHLLSVPECSKLPSMHWDPTACARLPHLAFPPMTSSKPSVDIPNLPSSSSSSFSVSPTYSMTVIISIMSSFAIFVLLTITTLYCCRRRKQWKNKKRESAAVTLTTLPSELLLDRLHPNPMYQRMPLLLNPKLLSLEYPRNNIEYVRDIGEGAFGRVFQARAPGLLPYEPFTMVAVKMLKEEASADMQADFQREAALMAEFDNPNIVKLLGVCAVGKPMCLLFEYMAYGDLNEFLRSMSPHTVCSLSHSDLSMRAQVSSPGPPPLSCAEQLCIARQVAAGMAYLSERKFVHRDLATRNCLVGENMVVKIADFGLSRNIYSADYYKANENDAIPIRWMPPESIFYNRYTTESDVWAYGVVLWEIFSYGLQPYYGMAHEEVIYYVRDGNILSCPENCPVELYNLMRLCWSKLPADRPSFTSIHRILERMCERAEGTVSV

SEQ ID NO: 604 - protein, 380 aa, Homo sapiens
GTEKLPKAPVITTPLETVDALVEEVATFMCAVESYPQPEISWTRNKILIKLFDTRYSIRENGQLLTILSVEDSDDGIYCCTANNGVGGAVESCGALQVKMKPKITRPPINVKIIEGLKAVLPCTTMGNPKPSVSWIKGDSPLRENSRIAVLESGSLRIHNVQKEDAGQYRCVAKNSLGTAYSKVVKLEVEVFARILRAPESHNVTFGSFVTLHCTATGIPVPTITWIENGNAVSSGSIQESVKDRVIDSRLQLFITKPGLYTCIATNKHGEKFSTAKAAATISIAEWREYCLAVKELFCAKEWLVMEEKTHRGLYRSEMHLLSVPECSKLPSMHWDPTACARLPHLAFPPMTSSKPSVDIPNLPSSSSSSFSVSPTYSMT

SEQ ID NO: 605 - DNA, 2322 bp, Homo sapiens
atgagagagctcgtcaacattccactggtacatattcttactctggttgccttcagcggaactgagaaacttccaaaagctcctgtcatcaccactcctcttgaaacagtggatgccttagttgaagaagtggctactttcatgtgtgcagtggaatcctacccccagcctgagatttcctggactagaaataaaattctcattaaactctttgacacccggtacagcatccgggagaatgggcagctcctcaccatcctgagtgtggaagacagtgatgatggcatttactgctgcacggccaacaatggtgtgggaggagctgtggagagttgtggagccctgcaagtgaagatgaaacctaaaataactcgtcctcccataaatgtgaaaataatagagggattaaaagcagtcctaccatgtactacaatgggtaatcccaaaccatcagtgtcttggataaagggagacagccctctcagggaaaattcccgaattgcagttcttgaatctgggagcttgaggattcataacgtacaaaaggaagatgcaggacagtatcgatgtgtggcaaaaaacagcctcgggacagcatattccaaagtggtgaagctggaagttgaggtttttgccaggatcctgcgggctcctgaatcccacaatgtcacctttggctcctttgtgaccctgcactgtacagcaacaggcattcctgtccccaccatcacctggattgaaaacggaaatgctgtttcttctgggtccattcaagagagtgtgaaagaccgagtgattgactcaagactgcagctgtttatcaccaagccaggactctacacatgcatagctaccaataagcatggggagaagttcagtactgccaaggctgcagccaccatcagcatagcagaatggagagagtactgcttggcagtaaaggagctcttctgcgcaaaagaatggctggtaatggaagagaagacccacagaggactctacagatccgagatgcatttgctgtccgtgccagaatgcagcaagcttcccagcatgcattgggaccccacggcctgtgccagactgccacatctagcattcccaccaatgacgtcctcaaagccaagtgtggacattccaaatctgccttcctcctcctcttcttccttctctgtctcacctacatactccatgactgtaataatctccatcatgtccagctttgcaatatttgtgcttcttaccataactactctctattgctgccgaagaagaaaacaatggaaaaataagaaaagagaatcagcagcagtaaccctcaccacactgccttctgagctcttactagatagacttcatcccaaccccatgtaccagaggatgccgctccttctgaaccccaaattgctcagcctggagtatccaaggaataacattgaatatgtgagagacatcggagagggagcgtttggaagggtgtttcaagcaagggcaccaggcttacttccctatgaacctttcactatggtggcagtaaagatgctcaaagaagaagcctcggcagatatgcaagcggactttcagagggaggcagccctcatggcagaatttgacaaccctaacattgtgaagctattaggagtgtgtgctgtcgggaagccaatgtgcctgctctttgaatacatggcctatggtgacctcaatgagttcctccgcagcatgtcccctcacaccgtgtgcagcctcagtcacagtgacttgtctatgagggctcaggtctccagccctgggcccccacccctctcctgtgctgagcagctttgcattgccaggcaggtggcagctggcatggcttacctctcagaacgtaagtttgttcaccgagatttagccaccaggaactgcctggtgggcgagaacatggtggtgaaaattgccgactttggcctctccaggaacatctactcagcagactactacaaagctaatgaaaacgacgctatccctatccgttggatgccaccagagtccattttttataaccgctacactacagagtctgatgtgtgggcctatggcgtggtcctctgggagatcttctcctatggcctgcagccctactatgggatggcccatgaggaggtcatttactacgtgcgagatggcaacatcctctcctgccctgagaactgccccgtggagctgtacaatctcatgcgtctatgttggagcaagctgcctgcagacagacccagtttcaccagtattcaccgaattctggaacgcatgtgtgagagggcagagggaactgtgagtgtctaa

SEQ ID NO: 606 - DNA, 1140 bp, Homo sapiens
ggaactgagaaacttccaaaagctcctgtcatcaccactcctcttgaaacagtggatgccttagttgaagaagtggctactttcatgtgtgcagtggaatcctacccccagcctgagatttcctggactagaaataaaattctcattaaactctttgacacccggtacagcatccgggagaatgggcagctcctcaccatcctgagtgtggaagacagtgatgatggcatttactgctgcacggccaacaatggtgtgggaggagctgtggagagttgtggagccctgcaagtgaagatgaaacctaaaataactcgtcctcccataaatgtgaaaataatagagggattaaaagcagtcctaccatgtactacaatgggtaatcccaaaccatcagtgtcttggataaagggagacagccctctcagggaaaattcccgaattgcagttcttgaatctgggagcttgaggattcataacgtacaaaaggaagatgcaggacagtatcgatgtgtggcaaaaaacagcctcgggacagcatattccaaagtggtgaagctggaagttgaggtttttgccaggatcctgcgggctcctgaatcccacaatgtcacctttggctcctttgtgaccctgcactgtacagcaacaggcattcctgtccccaccatcacctggattgaaaacggaaatgctgtttcttctgggtccattcaagagagtgtgaaagaccgagtgattgactcaagactgcagctgtttatcaccaagccaggactctacacatgcatagctaccaataagcatggggagaagttcagtactgccaaggctgcagccaccatcagcatagcagaatggagagagtactgcttggcagtaaaggagctcttctgcgcaaaagaatggctggtaatggaagagaagacccacagaggactctacagatccgagatgcatttgctgtccgtgccagaatgcagcaagcttcccagcatgcattgggaccccacggcctgtgccagactgccacatctagcattcccaccaatgacgtcctcaaagccaagtgtggacattccaaatctgccttcctcctcctcttcttccttctctgtctcacctacatactccatgact

SEQ ID NO: 607-800 - skipped (194 entries)

SEQ ID NO: 801 - protein, 574 aa, Artificial Sequence
  Description of Artificial Sequence: Synthetic polypeptide
MDAMKRGLCCVLLLCGAVFVSPGAETVHCDLQPVGPERDEVTYTTSQVSKGCVAQAPNAILEVHVLFLEFPTGPSQLELTLQASKQNGTWPREVLLVLSVNSSVFLHLQALGIPLHLAYNSSLVTFQEPPGVNTTELPSFPKTQILEWAAERGPITSAAELNDPQSILLRLGQAQGSLSFCMLEASQDMGRTLEWRPRTPALVRGCHLEGVAGHKEAHILRVLPGHSAGPRTVTVKVELSCAPGDLDAVLILQGPPYVSWLIDANHNMQIWTTGEYSFKIFPEKNIRGFKLPDTPQGLLGEARMLNASIVASFVELPLASIVSLHASSCGGRLQTSPAPIQTTPPTGGGTHTCPPCPAPELLGGPSVFLFPPKPKDTLMISRTPEVTCVVVDVSHEDPEVKFNWYVDGVEVHNAKTKPREEQYNSTYRVVSVLTVLHQDWLNGKEYKCKVSNKALPAPIEKTISKAKGQPREPQVYTLPPCREEMTKNQVSLWCLVKGFYPSDIAVEWESNGQPENNYKTTPPVLDSDGSFFLYSKLTVDKSRWQQGNVFSCSVMHEALHNHYTQKSLSLSPGK

SEQ ID NO: 802 - protein, 550 aa, Artificial Sequence
  Description of Artificial Sequence: Synthetic polypeptide
ETVHCDLQPVGPERDEVTYTTSQVSKGCVAQAPNAILEVHVLFLEFPTGPSQLELTLQASKQNGTWPREVLLVLSVNSSVFLHLQALGIPLHLAYNSSLVTFQEPPGVNTTELPSFPKTQILEWAAERGPITSAAELNDPQSILLRLGQAQGSLSFCMLEASQDMGRTLEWRPRTPALVRGCHLEGVAGHKEAHILRVLPGHSAGPRTVTVKVELSCAPGDLDAVLILQGPPYVSWLIDANHNMQIWTTGEYSFKIFPEKNIRGFKLPDTPQGLLGEARMLNASIVASFVELPLASIVSLHASSCGGRLQTSPAPIQTTPPTGGGTHTCPPCPAPELLGGPSVFLFPPKPKDTLMISRTPEVTCVVVDVSHEDPEVKFNWYVDGVEVHNAKTKPREEQYNSTYRVVSVLTVLHQDWLNGKEYKCKVSNKALPAPIEKTISKAKGQPREPQVYTLPPCREEMTKNQVSLWCLVKGFYPSDIAVEWESNGQPENNYKTTPPVLDSDGSFFLYSKLTVDKSRWQQGNVFSCSVMHEALHNHYTQKSLSLSPGK

SEQ ID NO: 803 - protein, 352 aa, Artificial Sequence
  Description of Artificial Sequence: Synthetic polypeptide
MDAMKRGLCCVLLLCGAVFVSPGADPVKPSRGPLVTCTCESPHCKGPTCRGAWCTVVLVREEGRHPQEHRGCGNLHRELCRGRPTEFVNHYCCDSHLCNHNVSLVLEATQPPSEQPGTDGQLATGGGTHTCPPCPAPELLGGPSVFLFPPKPKDTLMISRTPEVTCVVVDVSHEDPEVKFNWYVDGVEVHNAKTKPREEQYNSTYRVVSVLTVLHQDWLNGKEYKCKVSNKALPAPIEKTISKAKGQPREPQVCTLPPSREEMTKNQVSLSCAVKGFYPSDIAVEWESNGQPENNYKTTPPVLDSDGSFFLVSKLTVDKSRWQQGNVFSCSVMHEALHNHYTQKSLSLSPGK

SEQ ID NO: 804 - protein, 328 aa, Artificial Sequence
  Description of Artificial Sequence: Synthetic polypeptide
DPVKPSRGPLVTCTCESPHCKGPTCRGAWCTVVLVREEGRHPQEHRGCGNLHRELCRGRPTEFVNHYCCDSHLCNHNVSLVLEATQPPSEQPGTDGQLATGGGTHTCPPCPAPELLGGPSVFLFPPKPKDTLMISRTPEVTCVVVDVSHEDPEVKFNWYVDGVEVHNAKTKPREEQYNSTYRVVSVLTVLHQDWLNGKEYKCKVSNKALPAPIEKTISKAKGQPREPQVCTLPPSREEMTKNQVSLSCAVKGFYPSDIAVEWESNGQPENNYKTTPPVLDSDGSFFLVSKLTVDKSRWQQGNVFSCSVMHEALHNHYTQKSLSLSPGK

SEQ ID NO: 805 - protein, 356 aa, Artificial Sequence
  Description of Artificial Sequence: Synthetic polypeptide
MDAMKRGLCCVLLLCGAVFVSPGAMEDEKPKVNPKLYMCVCEGLSCGNEDHCEGQQCFSSLSINDGFHVYQKGCFQVYEQGKMTCKTPPSPGQAVECCQGDWCNRNITAQLPTKGKSFPGTQNFHLETGGGTHTCPPCPAPELLGGPSVFLFPPKPKDTLMISRTPEVTCVVVDVSHEDPEVKFNWYVDGVEVHNAKTKPREEQYNSTYRVVSVLTVLHQDWLNGKEYKCKVSNKALPAPIEKTISKAKGQPREPQVCTLPPSREEMTKNQVSLSCAVKGFYPSDIAVEWESNGQPENNYKTTPPVLDSDGSFFLVSKLTVDKSRWQQGNVFSCSVMHEALHNHYTQKSLSLSPGK

SEQ ID NO: 806 - protein, 332 aa, Artificial Sequence
  Description of Artificial Sequence: Synthetic polypeptide
MEDEKPKVNPKLYMCVCEGLSCGNEDHCEGQQCFSSLSINDGFHVYQKGCFQVYEQGKMTCKTPPSPGQAVECCQGDWCNRNITAQLPTKGKSFPGTQNFHLETGGGTHTCPPCPAPELLGGPSVFLFPPKPKDTLMISRTPEVTCVVVDVSHEDPEVKFNWYVDGVEVHNAKTKPREEQYNSTYRVVSVLTVLHQDWLNGKEYKCKVSNKALPAPIEKTISKAKGQPREPQVCTLPPSREEMTKNQVSLSCAVKGFYPSDIAVEWESNGQPENNYKTTPPVLDSDGSFFLVSKLTVDKSRWQQGNVFSCSVMHEALHNHYTQKSLSLSPGK

SEQ ID NO: 807 - protein, 573 aa, Artificial Sequence
  Description of Artificial Sequence: Synthetic polypeptide
MDAMKRGLCCVLLLCGAVFVSPGAETVHCDLQPVGPERDEVTYTTSQVSKGCVAQAPNAILEVHVLFLEFPTGPSQLELTLQASKQNGTWPREVLLVLSVNSSVFLHLQALGIPLHLAYNSSLVTFQEPPGVNTTELPSFPKTQILEWAAERGPITSAAELNDPQSILLRLGQAQGSLSFCMLEASQDMGRTLEWRPRTPALVRGCHLEGVAGHKEAHILRVLPGHSAGPRTVTVKVELSCAPGDLDAVLILQGPPYVSWLIDANHNMQIWTTGEYSFKIFPEKNIRGFKLPDTPQGLLGEARMLNASIVASFVELPLASIVSLHASSCGGRLQTSPAPIQTTPPTGGGTHTCPPCPAPELLGGPSVFLFPPKPKDTLMISRTPEVTCVVVDVSHEDPEVKFNWYVDGVEVHNAKTKPREEQYNSTYRVVSVLTVLHQDWLNGKEYKCKVSNKALPAPIEKTISKAKGQPREPQVCTLPPSREEMTKNQVSLSCAVKGFYPSDIAVEWESRGQPENNYKTTPPVLDSRGSFFLVSKLTVDKSRWQQGNVFSCSVMHEALHNHYTQKSLSLSPG

SEQ ID NO: 808 - DNA, 1719 bp, Artificial Sequence
  Description of Artificial Sequence: Synthetic polynucleotide
atggatgcaatgaagagagggctctgctgtgtgctgctgctgtgtggagcagtcttcgtttcgcccggcgccgaaacagtccattgtgaccttcagcctgtgggccccgagagggacgaggtgacatataccactagccaggtctcgaagggctgcgtggctcaggcccccaatgccatccttgaagtccatgtcctcttcctggagttcccaacgggcccgtcacagctggagctgactctccaggcatccaagcaaaatggcacctggccccgagaggtgcttctggtcctcagtgtaaacagcagtgtcttcctgcatctccaggccctgggaatcccactgcacttggcctacaattccagcctggtcaccttccaagagcccccgggggtcaacaccacagagctgccatccttccccaagacccagatccttgagtgggcagctgagaggggccccatcacctctgctgctgagctgaatgacccccagagcatcctcctccgactgggccaagcccaggggtcactgtccttctgcatgctggaagccagccaggacatgggccgcacgctcgagtggcggccgcgtactccagccttggtccggggctgccacttggaaggcgtggccggccacaaggaggcgcacatcctgagggtcctgccgggccactcggccgggccccggacggtgacggtgaaggtggaactgagctgcgcacccggggatctcgatgccgtcctcatcctgcagggtcccccctacgtgtcctggctcatcgacgccaaccacaacatgcagatctggaccactggagaatactccttcaagatctttccagagaaaaacattcgtggcttcaagctcccagacacacctcaaggcctcctgggggaggcccggatgctcaatgccagcattgtggcatccttcgtggagctaccgctggccagcattgtctcacttcatgcctccagctgcggtggtaggctgcagacctcacccgcaccgatccagaccactcctcccaccggtggtggaactcacacatgcccaccgtgcccagcacctgaactcctggggggaccgtcagtcttcctcttccccccaaaacccaaggacaccctcatgatctcccggacccctgaggtcacatgcgtggtggtggacgtgagccacgaagaccctgaggtcaagttcaactggtacgtggacggcgtggaggtgcataatgccaagacaaagccgcgggaggagcagtacaacagcacgtaccgtgtggtcagcgtcctcaccgtcctgcaccaggactggctgaatggcaaggagtacaagtgcaaggtctccaacaaagccctcccagcccccatcgagaaaaccatctccaaagccaaagggcagccccgagaaccacaggtgtgcaccctgcccccatcccgggaggagatgaccaagaaccaggtcagcctgtcctgcgccgtcaaaggcttctatcccagcgacatcgccgtggagtgggagagccgcgggcagccggagaacaactacaagaccacgcctcccgtgctggactcccgcggctccttcttcctcgtgagcaagctcaccgtggacaagagcaggtggcagcaggggaacgtcttctcatgctccgtgatgcatgaggctctgcacaaccactacacgcagaagagcctctccctgtctccgggt

SEQ ID NO: 809 - protein, 549 aa, Artificial Sequence
  Description of Artificial Sequence: Synthetic polypeptide
ETVHCDLQPVGPERDEVTYTTSQVSKGCVAQAPNAILEVHVLFLEFPTGPSQLELTLQASKQNGTWPREVLLVLSVNSSVFLHLQALGIPLHLAYNSSLVTFQEPPGVNTTELPSFPKTQILEWAAERGPITSAAELNDPQSILLRLGQAQGSLSFCMLEASQDMGRTLEWRPRTPALVRGCHLEGVAGHKEAHILRVLPGHSAGPRTVTVKVELSCAPGDLDAVLILQGPPYVSWLIDANHNMQIWTTGEYSFKIFPEKNIRGFKLPDTPQGLLGEARMLNASIVASFVELPLASIVSLHASSCGGRLQTSPAPIQTTPPTGGGTHTCPPCPAPELLGGPSVFLFPPKPKDTLMISRTPEVTCVVVDVSHEDPEVKFNWYVDGVEVHNAKTKPREEQYNSTYRVVSVLTVLHQDWLNGKEYKCKVSNKALPAPIEKTISKAKGQPREPQVCTLPPSREEMTKNQVSLSCAVKGFYPSDIAVEWESRGQPENNYKTTPPVLDSRGSFFLVSKLTVDKSRWQQGNVFSCSVMHEALHNHYTQKSLSLSPG

SEQ ID NO: 810 - protein, 351 aa, Artificial Sequence
  Description of Artificial Sequence: Synthetic polypeptide
MDAMKRGLCCVLLLCGAVFVSPGADPVKPSRGPLVTCTCESPHCKGPTCRGAWCTVVLVREEGRHPQEHRGCGNLHRELCRGRPTEFVNHYCCDSHLCNHNVSLVLEATQPPSEQPGTDGQLATGGGTHTCPPCPAPELLGGPSVFLFPPKPKDTLMISRTPEVTCVVVDVSHEDPEVKFNWYVDGVEVHNAKTKPREEQYNSTYRVVSVLTVLHQDWLNGKEYKCKVSNKALPAPIEKTISKAKGQPREPQVYTLPPCREEMTENQVSLWCLVKGFYPSDIAVEWESNGQPENNYKTTPPVLDSDGSFFLYSKLTVDKSRWQQGNVFSCSVMHEALHNHYTQDSLSLSPG

SEQ ID NO: 811 - DNA, 1053 bp, Artificial Sequence
  Description of Artificial Sequence: Synthetic polynucleotide
atggatgcaatgaagagagggctctgctgtgtgctgctgctgtgtggagcagtcttcgtttcgcccggcgccgaccctgtgaagccgtctcggggcccgctggtgacctgcacgtgtgagagcccacattgcaaggggcctacctgccggggggcctggtgcacagtagtgctggtgcgggaggaggggaggcacccccaggaacatcggggctgcgggaacttgcacagggagctctgcaggggccgccccaccgagttcgtcaaccactactgctgcgacagccacctctgcaaccacaacgtgtccctggtgctggaggccacccaacctccttcggagcagccgggaacagatggccagctggccaccggtggtggaactcacacatgcccaccgtgcccagcacctgaactcctggggggaccgtcagtcttcctcttccccccaaaacccaaggacaccctcatgatctcccggacccctgaggtcacatgcgtggtggtggacgtgagccacgaagaccctgaggtcaagttcaactggtacgtggacggcgtggaggtgcataatgccaagacaaagccgcgggaggagcagtacaacagcacgtaccgtgtggtcagcgtcctcaccgtcctgcaccaggactggctgaatggcaaggagtacaagtgcaaggtctccaacaaagccctcccagcccccatcgagaaaaccatctccaaagccaaagggcagccccgagaaccacaggtgtacaccctgcccccatgccgggaggagatgaccgagaaccaggtcagcctgtggtgcctggtcaaaggcttctatcccagcgacatcgccgtggagtgggagagcaatgggcagccggagaacaactacaagaccacgcctcccgtgctggactccgacggctccttcttcctctatagcaagctcaccgtggacaagagcaggtggcagcaggggaacgtcttctcatgctccgtgatgcatgaggctctgcacaaccactacacgcaggacagcctctccctgtctccgggt

SEQ ID NO: 812 - protein, 327 aa, Artificial Sequence
  Description of Artificial Sequence: Synthetic polypeptide
DPVKPSRGPLVTCTCESPHCKGPTCRGAWCTVVLVREEGRHPQEHRGCGNLHRELCRGRPTEFVNHYCCDSHLCNHNVSLVLEATQPPSEQPGTDGQLATGGGTHTCPPCPAPELLGGPSVFLFPPKPKDTLMISRTPEVTCVVVDVSHEDPEVKFNWYVDGVEVHNAKTKPREEQYNSTYRVVSVLTVLHQDWLNGKEYKCKVSNKALPAPIEKTISKAKGQPREPQVYTLPPCREEMTENQVSLWCLVKGFYPSDIAVEWESNGQPENNYKTTPPVLDSDGSFFLYSKLTVDKSRWQQGNVFSCSVMHEALHNHYTQDSLSLSPG

SEQ ID NO: 813 - protein, 48 aa, Artificial Sequence
  Description of Artificial Sequence: Synthetic polypeptide
  MOD_RES (2)..(2): Any amino acid
  MOD_RES (4)..(7): Any amino acid
  MOD_RES (9)..(10): Any amino acid
  MOD_RES (12)..(12): Any amino acid
  MOD_RES (14)..(19): Any amino acid
  MOD_RES (21)..(24): Any amino acid
  MOD_RES (26)..(31): Any amino acid
  MISC_FEATURE (26)..(31): This region may encompass 4-6 residues
  MOD_RES (33)..(43): Any amino acid
  MISC_FEATURE (33)..(43): This region may encompass 9-11 residues
  MOD_RES (47)..(47): Any amino acid
CXWXXXXCXXCXCXXXXXXCXXXXCXXXXXXCXXXXXXXXXXXCCPXC

SEQ ID NO: 814 - protein, 6 aa, Artificial Sequence
  Description of Artificial Sequence: Synthetic 6xHis tag
HHHHHH

SEQ ID NO: 815 - protein, 150 aa, Rattus norvegicus
MTAPWAALALLWGSLCAGSGRGEAETRECIYYNANWELERTNQSGLERCEGEQDKRLHCYASWPNSSGTIELVKKGCWLDDFNCYDRQECVATEENPQVYFCCCEGNFCNERFTHLPEPGGPEVTYEPPPTAPTLLTVLAYSLLPIGGLS

SEQ ID NO: 816 - protein, 150 aa, Sus scrofa
MTAPWAALALLWGSLCVGSGRGEAETRECIYYNANWELERTNQSGLERCEGEQDKRLHCYASWRNSSGTIELVKKGCWLDDFNCYDRQECVATEENPQVYFCCCEGNFCNERFTHLPEAGGPEVTYEPPPTAPTLLTVLAYSLLPIGGLS

SEQ ID NO: 817 - protein, 150 aa, Mus musculus
MTAPWAALALLWGSLCAGSGRGEAETRECIYYNANWELERTNQSGLERCEGEQDKRLHCYASWRNSSGTIELVKKGCWLDDFNCYDRQECVATEENPQVYFCCCEGNFCNERFTHLPEPGGPEVTYEPPPTAPTLLTVLAYSLLPIGGLS

SEQ ID NO: 818 - protein, 150 aa, Homo sapiens
MTAPWVALALLWGSLCAGSGRGEAETRECIYYNANWELERTNQSGLERCEGEQDKRLHCYASWRNSSGTIELVKKGCWLDDFNCYDRQECVATEENPQVYFCCCEGNFCNERFTHLPEAGGPEVTYEPPPTAPTLLTVLAYSLLPIGGLS

SEQ ID NO: 819 - protein, 150 aa, Bos taurus
MTAPWAALALLWGSLCAGSGRGEAETRECIYYNANWELERTNQSGLERCEGERDKRLHCYASWRNSSGTIELVKKGCWLDDFNCYDRQECVATEENPQVYFCCCEGNFCNERFTHLPEAGGPEVTYEPPPTAPTLLTVLAYSLLPVGGLS

SEQ ID NO: 820 - protein, 150 aa, Xenopus sp.
MGASVALTFLLLLATFRAGSGHDEVETRECIYYNANWELEKTNQSGVERLVEGKKDKRLHCYASWRNNSGFIELVKKGCWLDDFNCYDRQECIAKEENPQVFFCCCEGNYCNKKFTHLPEVETFDPKPQPSASVLNILIYSLLPIVGLSM

SEQ ID NO: 821 - protein, 150 aa, Homo sapiens
MGAAAKLAFAVFLISCSSGAILGRSETQECLFFNANWEKDRTNQTGVEPCYGDKDKRRHCFATWKNISGSIEIVKQGCWLDDINCYDRTDCVEKKDSPEVYFCCCEGNMCNEKFSYFPEMEVTQPTSNPVTPKPPYYNILLYSLVPLMLI

SEQ ID NO: 822 - protein, 154 aa, Artificial Sequence
  Description of Artificial Sequence: Synthetic consensus sequence
  MOD_RES (8)..(8): Thr, Ala or absent
  MOD_RES (121)..(121): Pro, Ala, Val or Met
MTAPWAAXLALLWGSLCAGSGRGEAETRECIYYNANWELERTNQSGLERLCEGEQDKRLHCYASWRNSSGTIELVKKGCWLDDFNCYDRQECVATEENPQVYFCCCEGNFCNERFTHLPEXGGPEVTYEPKPPTAPTLLTVLAYSLLPIGGLSM
